(19) United States
(12) Patent Application Publication
(10) Pub. No.: US 2010/0286251 A1
(43) Pub. Date: Nov. 11, 2010

(54) Mammalian Genes Involved In Viral Infection And Tumor Suppression

(76) Inventor: Donald H. Rubin, Nashville, TN (US)

Correspondence Address: Ballard Spahr LLP, SUITE 1000, 999 PEACHTREE STREET, ATLANTA, GA, 30309-3915, US

(21) Appl. No.: 12/718,619

(22) Filed: Mar. 5, 2010

Related U.S. Application Data
(62) Division of application No. 10/513,426, filed on Oct. 11, 2006, now Pat. No. 7,691,599.

(51) Int. Cl. A61K 31/711; C12Q 1/70; C12Q 1/68; A61P 31/12

(52) U.S. Cl. 514/44 R; 435/5; 435/6

(57) ABSTRACT

The present invention provides methods of identifying cellular genes used for viral, bacterial or parasitic growth. Also provided by the present invention are nucleic acids related to and methods of reducing or preventing viral, bacterial or parasitic infection.

[0001] This application claims priority to U.S. Provisional Application Ser. No. 60/377,136, filed May 2, 2002 which is hereby incorporated in its entirety by this reference.

### BACKGROUND

[0002] 1. Field of the Invention

[0003] The present invention provides methods of identifying cellular genes used for viral, bacterial or parasitic growth or for tumor progression. Thus, the present invention relates to nucleic acids related to and methods of reducing or preventing viral, bacterial or parasitic infection and for suppressing tumor progression. The invention also relates to methods for screening for additional such genes.

[0004] 2. Background Art

[0005] Various projects have been directed toward isolating and sequencing the genome of various animals, notably the human. However, most methodologies provide nucleotide sequences for which no function is linked or even suggested, thus limiting the immediate usefulness of such data.

[0006] The present invention, in contrast, provides methods of screening only for nucleic acids that are involved in a specific process, i.e., viral infection, bacterial or parasitic or tumor progression, and further, for nucleic acids useful in treatments for these processes because by this method only nucleic acids which are also nonessential to the cell are isolated. Such methods are highly useful, since they ascribe a function to each isolated gene, and thus the isolated nucleic acids can immediately be utilized in various specific methods and procedures.

[0007] For, example, the present invention provides methods of isolating nucleic acids encoding gene products used for viral infection, but nonessential to the cell. Viral infections of the intestine and liver are significant causes of human morbidity and mortality. Understanding the molecular mechanisms of such infections will lead to new approaches in their treatment and control.

[0008] Viruses can establish a variety of types of infection. These infections can be generally classified as lytic or persistent, though some lytic infections are considered persistent. Generally, persistent infections fall into two categories: (1) chronic (productive) infection, i.e., infection wherein infectious virus is present and can be recovered by traditional biological methods and (2) latent infection, i.e., infection wherein viral genome is present in the cell but infectious virus is generally not produced except during intermittent episodes of reactivation. Persistence generally involves stages of both productive and latent infection.

[0009] Lytic infections can also persist under conditions where only a small fraction of the total cells are infected (smoldering (cycling) infection). The few infected cells release virus and are killed, but the progeny virus again only infect a small number of the total cells. Examples of such smoldering infections include the persistence of lactic dehydrogenase virus in mice (Mahy, B. W. J., Br. Med. Bull. 41: 50-55 (1985)) and adenovirus infection in humans (Porter, D. D. pp. 784-790 in Baron, S., ed. Medical Microbiology 2d ed. (Addison-Wesley, Menlo Park, Calif. 1985)).

[0010] Furthermore, a virus may be lytic for some cell types but not for others. For example, evidence suggests that human immunodeficiency virus (HIV) is more lytic for T cells than for monocytes/macrophages, and therefore can result in a productive infection of T cells that can result in cell death, whereas HIV-infected mononuclear phagocytes may produce virus for considerable periods of time without cell lysis. (Klatzmann, et al. Science 225:59-62 (1984); Koyanagi, et al. Science 241:1673-1675 (1988); Sattentau, et al. Cell 52:631-633 (1988)).

[0011] Traditional treatments for viral infection include pharmaceuticals aimed at specific virus derived proteins, such as HIV protease or reverse transcriptase, or recombinant (cloned) immune modulators (host derived), such as the interferons. However, the current methods have several limitations and drawbacks which include high rates of viral mutations which render anti-viral pharmaceuticals ineffective. For immune modulators, limited effectiveness, limiting side effects, a lack of specificity all limit the general applicability of these agents. Also the rate of success with current antivirals and immune-modulators has been disappointing.

[0012] The current invention focuses on isolating genes that are not essential for cellular survival when disrupted in one or both alleles, but which are required for virus replication. This may occur with a dose effect, in which one allele knock-out may confer the phenotype of virus resistance for the cell. As targets for therapeutic intervention, inhibition of these cellular gene products, including: proteins, parts of proteins (modification enzymes that include, but are not restricted to glycosylation, lipid modifiers [myriolate, etc.]), lipids, transcription elements and RNA regulatory molecules, may be less likely to have profound toxic side effects and virus mutation is less likely to overcome the ‘block’ to replicate successfully.

[0013] The present invention provides a significant improvement over previous methods of attempted therapeutic intervention against viral infection by addressing the cellular genes required by the virus for growth. Therefore, the present invention also provides an innovative therapeutic approach to intervention in viral infection by providing methods to treat viruses by inhibiting the cellular genes necessary for viral infection. Because these genes, by virtue of the means by which they are originally detected, are nonessential to the cell's survival, these treatment methods can be used in a subject without serious detrimental effects to the subject, as has been found with previous methods. The present invention also provides the surprising discovery that virally infected cells are dependent upon a factor in serum to survive. Therefore, the present invention also provides a method for treating viral infection by inhibiting this serum survival factor. Finally, these discoveries also provide a novel method for removing virally infected cells from a cell culture by removing, inhibiting or disrupting this serum survival factor in the culture so that non-infected cells selectively survive.

[0014] The methods provided herein can also be used against bacterial and/or parasitic infections. Specifically, the same methods are employed but a parasite or bacteria replaces the virus.

[0015] The selection of tumor suppressor gene(s) has become an important area in the discovery of new target for therapeutic intervention of cancer. Since the discovery that cells are restricted from promiscuous entry into the cell cycle by specific genes that are capable of suppressing a ‘transformed’ phenotype, considerable time has been invested in the discovery of such genes. Some of these genes include the gene associated by rhabdomyosarcoma (Rb) and the p53 (apoptosis related) encoding gene. The present invention provides a method, using gene-trapping, to select cell lines that have transformed phenotype from cells that are not transformed and to isolate from these cells a gene that either participates in or can suppress a malignant phenotype. Thus, by the nature of the isolation process, a function is associated with the isolated genes. The capacity to select quickly tumor suppressor genes or oncogenes can provide unique targets in the process of treating or preventing, and even for diagnostic testing of, cancer.

### DETAILED DESCRIPTION OF THE INVENTION

[0016] The present invention utilizes a “gene trap” method along with a selection process to identify and isolate nucleic acids from genes associated with a particular function. Specifically, it provides a means of isolating cellular genes necessary for viral infection but not essential for the cell's survival, and it provides a means of isolating cellular genes that suppress tumor progression.

[0017] The present invention also provides a core discovery that virally infected cells become dependent upon at least one factor present in serum for survival, whereas non-infected cells do not exhibit this dependence. This core discovery has been utilized in the present invention in several ways. First, inhibition of the “serum survival factor” can be utilized to eradicate persistently virally infected cells from populations of non-infected cells. Inhibition of this factor can also be used to treat virus infection in a subject, as further described herein. Additionally, inhibition of or withdrawal of the serum survival factor in tissue culture allows for the detection of cellular genes required for viral replication yet nonessential for an uninfected cell to survive. The present invention further provides several such cellular genes, as well as methods of treating viral infections by inhibiting the functioning of such genes.

[0018] As used herein, “replication” and “infection” can include any of the processes for viral success in a cell, e.g. infection, growth, replication, and lysis.

[0019] Furthermore, the present invention provides a method for isolation of cellular genes utilized in tumor progression.

[0020] The invention also provides cellular genes whose overexpression is associated with inhibition of viral growth and/or reproduction.

[0021] The present method provides several cellular genes that are necessary for viral growth in the cell but are not essential for the cell to survive. These genes are important for lytic and persistent infection by viruses. These genes were isolated by generating gene trap libraries by infecting cells with a retrovirus gene trap vector, selecting for cells in which a gene trap event occurred (i.e., in which the vector had inserted such that the promoterless marker gene was inserted such that a cellular promoter promotes transcription of the marker gene, i.e., inserted into a functioning gene), starving the cells of serum, infecting the selected cells with the virus of choice while continuing serum starvation, and adding back serum to allow visible colonies to develop, which colonies were cloned by limiting dilution. Genes into which the retrovirus gene trap vector inserted were then isolated from the colonies using probes specific for the retrovirus gene trap vector. Thus nucleic acids isolated by this method are isolated portions of genes. Additionally, utilizing this method, several cellular genes were isolated whose overexpression prevents viral infection or tumor growth, and they provide methods of treating viral infection or tumor growth/suppression by overexpression of these genes.

[0022] The present invention identifies the genomic loci of genes required for viral replication or responsible for a malignant phenotype by providing genomic sequences disrupted by the present gene trap method. Providing the sequence of the disrupted locus identifies the gene that is disrupted. Thus, the invention provides the gene at the locus disrupted by the present gene trap vector. By identifying the gene that is disrupted, the invention provides both the gene and its product(s) as targets for antiviral therapies.

[0023] As targets for anti-viral or anti-cancer therapies, the invention provides several examples of regulatory sequences (e.g., transcription factors). In some cases, disruption of the transcription factor has a direct impact on viral growth. In other cases disruption of the transcription factor affects viral growth by affecting transcription or translation of the gene or genes that are under its control. Examples of multi-gene pathways controlled by a transcription factor that is disrupted by the present vectors, such as the CTCF pathway, are provided herein.

[0024] Thus the present invention provides a method of identifying a cellular gene necessary for viral growth in a cell and nonessential for cellular survival, comprising (a) transferring into a cell culture growing in serum-containing medium a vector encoding a selective marker gene lacking a functional promoter, (b) selecting cells expressing the marker gene, (c) removing serum from the culture medium, (d) infecting the cell culture with the virus, and (e) isolating from the surviving cells a cellular gene within which the marker gene is inserted, thereby identifying a gene necessary for viral growth in a cell and nonessential for cellular survival. The present invention also provides a method of identifying a cellular gene used for viral growth in a cell and nonessential for cellular survival, comprising (a) transferring into a cell culture growing in serum-containing medium a vector encoding a selective marker gene lacking a functional promoter, (b) selecting cells expressing the marker gene, (c) removing serum from the culture medium, (d) infecting the cell culture with the virus, and (e) isolating from the surviving cells a cellular gene within which the marker gene is inserted, thereby identifying a gene necessary for viral growth in a cell and nonessential for cellular survival. In any selected cell type, such as Chinese hamster ovary cells, one can readily determine if serum starvation is required for selection. If it is not, serum starvation may be eliminated from the steps.

[0025] Thus the present invention provides a method of identifying a cellular gene necessary for viral growth in a cell and nonessential for cellular survival, comprising (a) transferring into a cell culture growing in serum-containing medium a vector encoding a selective marker gene lacking a functional promoter, (b) selecting cells expressing the marker gene, (c) infecting the cell culture with the virus, and (d) isolating from the surviving cells a cellular gene within which the marker gene is inserted, thereby identifying a gene necessary for viral growth in a cell and nonessential for cellular survival. The present invention also provides a method of identifying a cellular gene used for viral growth in a cell and nonessential for cellular survival, comprising (a) transferring into a cell culture growing in serum-containing medium a vector encoding a selective marker gene lacking a functional promoter, (b) selecting cells expressing the marker gene, (c) infecting the cell culture with the virus, and (d) isolating from the surviving cells a cellular gene within which the marker gene is inserted, thereby identifying a gene necessary for viral growth in a cell and nonessential for cellular survival.

[0026] Alternatively, instead of removing serum from the culture medium, a serum factor required by the virus for growth can be inhibited, such as by the administration of an antibody that specifically binds that factor. Furthermore, if it is believed that there are no or few persistently infected cells in the culture, the serum starvation step can be eliminated and the cells grown in usual medium for the cell type. Thus, the method can be used without regard for the serum survival factor where the virus is lylytic to the selection cell. If serum starvation is used, it can be continued for a time after the culture is infected with the virus. Serum can then be added back to the culture. If some other method is used to inactivate the factor, it can be discontinued, inactivated or removed (such as removing the anti-factor antibody, e.g., with a bound antibody directed against that antibody) prior to adding fresh serum back to the culture. Cells that survive are mutants having an inactivating insertion in a gene necessary for growth of the virus. The genes having the insertions can then be isolated by isolating sequences having the marker gene sequences. This mutational process disturbs a wild type function. A mutant gene may produce at a lower level a normal product, it may produce a normal product not normally found in these cells, it may cause the overproduction of a normal product, it may produce an altered product that has some functions but not others, or it may completely disrupt a gene function. Additionally, the mutation may disrupt an RNA that has a function but is never translated into a protein. For example, the alpha-tropomyosin gene has a 3′ RNA that is very important in cell regulation but never is translated into protein. (Cell 75 pg 1107-1117, Dec. 17, 1993).

[0027] As used herein, a cellular gene “nonessential for cellular survival” means a gene for which disruption of one or both alleles results in a cell viable for at least a period of time which allows viral replication to be inhibited for preventative or therapeutic uses or use in research. A gene “necessary for viral growth” means the gene product, either protein or RNA, secreted or not, is necessary, either directly or indirectly in some way for the virus to grow, and therefore, in the absence of that gene product (i.e., a functionally available gene product), at least some of the cells containing the virus die. For example, such genes can encode cell cycle regulatory proteins, proteins affecting the vacuolar hydrogen pump, or proteins involved in protein folding and protein modification, including but not limited to: phosphorylation, methylation, glycosylation, myrislation or other lipid moiety, or protein processing via enzymatic processing. Some examples of such genes are exemplified herein, wherein some of the isolated nucleic acids correspond to genes such as vacuolar H+ATPase, alpha tropomyosin, gas5 gene, ras complex, N-acetyl-glucosaminyltransferase I mRNA, and calcyclin.

[0028] Any virus capable of infecting the cell can be used for this method. Virus can be selected based upon the particular infection desired to study. However, it is contemplated by the present invention that many viruses will be dependent upon the same cellular genes for survival; thus a cellular gene isolated using one virus can be used as a target for therapy for other viruses as well. All viruses that can be sorted using lytic infection, or that can be selected through multiple rounds of robotic infection (if the cell line is not totally lytic), can be sorted against PI cells by using multiple rounds of selection in the same library. During this process the inserts in PI cells should be random, unless the disrupted gene is important for the establishment of the PI state. Other genes selected should be in cells that are resistant to infection; thus, this process is facilitated by robotic selection, as multiple rounds of selection can be achieved.

[0029] Any cellular gene can be tested for relevancy to any desired virus using the methods set forth herein, i.e., in general, by inhibiting the gene or its gene product in a cell and determining if the desired virus can grow in that cell. Some examples of viruses include HIV (including HIV-1 and HIV-2); parvovirus; papillomaviruses; SARS (severe acute respiratory syndrome) virus; hantaviruses; influenza viruses (e.g., influenza A, B and C viruses); hepatitis viruses A to G; caliciviruses; astroviruses; rotaviruses; coronaviruses, such as human respiratory coronavirus; picornaviruses, such as human rhinovirus and enterovirus; ebola virus; human herpesvirus (e.g., HSV-1-9) including zoster, epstein-bar, and human cytomegalovirus; human cytomegalovirus; human adenovirus; hantaviruses; for animal, the animal counterpart to any above listed human virus, animal retroviruses, such as simian immunodeficiency virus, avian immunodeficiency virus, bovine immunodeficiency virus, feline immunodeficiency virus, equine infectious anemia virus, caprine arthritis encephalitis virus or visna virus.

[0030] The methods of the present invention can be used to identify and target bacteria. Examples of bacteria that can be targeted include, but are not limited to, the following: Listeria (sp.), Mycobacterium tuberculosis, Ricketsia (all types), Ehrlichia, Clrylamida. Further examples of bacteria that can be targeted by the present methods include M. tuberculosis, M. bovis, M. bovis strain BCG, BCG substrains, M. avium, M. intracellulare, M. africanum, M. kansasii, M. marinum, M. ulcerans, M. avium subspecies paratuberculosis, Nocardia asteroides, other Nocardia species, Legionella pneumophila, other Legionella species, Salmonella typhi, other Salmonella species, Shigella species, Yersinia pestis, Pasteurella haemolytica, Pasteurella multocida, other Pasteurella species, Actinobacillus pleuropneumoniae, Listeria monocytogenes, Listeria ivanovii, Brucella abortus, other Brucella species, Cowdria ruminantiumn, Chlamydia pneumoniae, Chlamydia trachomatis, Chlamydia psittaci, Coxiella burnetti, other Ricketsial species, Ehrlichia species, Staphylococcus aureus, Staphylococcus epidermidis, Streptococcus pyogenes, Streptococcus agalactiae, Bacillus anthracis, Escherichia coli, Vibrio cholerae, Campylobacter species, Neiserria meningitidis, Neiserria gonorrhea, Pseudomonas aeruginosa, other Pseudomonas species, Haemophilus influenzae, Haemophilus ducreyi, other Hemophilus species, Clostridium tetani, other Clostridium species, Yersinia enterolitica, and other Yersinia species.

[0031] The methods of the present invention can be used to identify and target parasites. Examples of parasites that can be targeted include, but are not limited to, the following: Cryptosporidium, Plasmodium (all species), American trypanosomes (T. cruzi). Furthermore, examples of protozoan and fungal species contemplated within the present methods include, but are not limited to, Plasmodium falciparum, other Plasmodium species, Toxoplasma gondii, Pneumocystis carinii, Trypanosoma cruzi, other trypanosomal species, Leishmania donovani, other Leishmania species, Theileria annulata, other Theileria species, Eimeria tenella, other Eimeria species, Histoplasma capsulatum, Cryptococcus neoformans, Blastomyces dermatitidis, Coccidioides inumitis, Paracoccidioides brasiliensis, Pneumocystis carinii, Penicillium marneffei, and Candida species.

[0032] The nucleic acids comprising cellular genes of this invention were isolated by the above method and as set forth in the examples. The invention includes a nucleic acid comprising the nucleotide sequence set forth in SEQ ID NO: 1, SEQ ID NO: 2, SEQ ID NO: 3, SEQ ID NO: 4, SEQ ID NO:5, SEQ ID NO:6, SEQ BD NO:7, SEQ ID NO:8, SEQ ID NO:9, SEQ ID NO:10, SEQ ID NO:11, SEQ ID NO:12, SEQ ID NO:13, SEQ ID NO:14, SEQ ID NO:15, SEQ ID NO:16, SEQ ID NO:17, SEQ ID NO:18, SEQ ID NO:19, SEQ ID NO:20, SEQ ID NO:21, SEQ ID NO:22, SEQ ID NO:23, SEQ ID NO:24, SEQ ID NO:25, SEQ ID NO:26, SEQ ID NO:27, SEQ ID NO:28, SEQ ID NO:29, SEQ ID NO:30, SEQ ID NO:31, SEQ ID NO:32, SEQ ID NO:33, SEQ ID NO:34, SEQ ID NO:35, SEQ ID NO:36, SEQ ID NO:37, SEQ ID NO:38, SEQ ID NO:39, SEQ ID NO:40, SEQ ID NO:41, SEQ ID NO:42, SEQ ID NO:43, SEQ ID NO:44, SEQ ID NO:45, SEQ ID NO:46, SEQ ID NO:47, SEQ ID NO:48, SEQ HD NO:49, SEQ ID NO:50, SEQ ID NO:51, SEQ ID NO:52, SEQ ID NO:53, SEQ ID NO:54, SEQ ID NO:55, SEQ ID NO:56, SEQ ID NO:57, SEQ ID NO:58, SEQ ID NO:59, SEQ ID NO:60, SEQ ID NO:61, SEQ ID NO:62, SEQ ID NO:63, SEQ ID NO:64, SEQ ID NO:65, SEQ ID NO:66, SEQ ID NO:67, SEQ ID NO:68, SEQ ID NO:69, SEQ ID NO:70, SEQ ID NO:71, SEQ ID NO:72, SEQ ID NO:73, SEQ ID NO:74 or SEQ ID NO:75, SEQ ID NO: 84, SEQ ID NO: 85, SEQ ID NO: 86, SEQ ID NO: 87, SEQ ID NO: 88, SEQ ID NO: 89, SEQ ID NO: 90, SEQ ID NO: 91, SEQ ID NO: 93, SEQ ID NO: 94, SEQ ID NO:95, SEQ ID NO: 96, SEQ ID NO: 97, SEQ ID NO: 98, SEQ ID NO: 99, SEQ ID NO: 100, SEQ ID NO: 101, SEQ ID NO: 102, SEQ ID NO: 103, SEQ ID NO: 104, SEQ ID NO: 105, SEQ ID NO: 106, SEQ ID NO: 107, SEQ ID NO: 108, SEQ ID NO: 113, SEQ ID NO: 114 SEQ ID NO: 115, SEQ ID NO: 116, SEQ ID NO: 117, SEQ ID NO: 118, SEQ ID NO: 120, SEQ ID NO: 121, SEQ ID NO: 122, SEQ ID NO: 123, SEQ ID NO: 124, SEQ ID NO: 125, SEQ ID NO: 126, SEQ ID NO: 127, SEQ ID NO: 128, SEQ ID NO: 129, SEQ ID NO: 130, SEQ ID NO: 131, SEQ ID NO: 132, SEQ ID NO: 133, SEQ ID NO: 134, SEQ ID NO: 135, SEQ ID NO: 136, SEQ ID NO: 137, SEQ ID NO: 138, SEQ ID NO: 139, SEQ ID NO: 140, SEQ ID NO: 141, SEQ ID NO: 142, SEQ ID NO: 143, SEQ ID NO: 144, SEQ ID NO: 145, SEQ ID NO: 146, SEQ ID NO147, SEQ ID NO: 148, SEQ ID NO: 149, SEQ ID NO: 150, SEQ ID NO: 151, SEQ ID NO: 152, SEQ ID NO: 153, SEQ ID NO: 154SEQ ID NO: 155, SEQ ID NO:156, SEQ ID NO: 157, SEQ ID NO: 158, SEQ ID NO: 159, SEQ ID NO: 160, SEQ ID NO: 161, SEQ ID NO: 162, SEQ ID NO: 163, SEQ ID NO: 164, SEQ ID NO: 165, SEQ ID NO: 166, SEQ ID NO: 167, SEQ ID NO: 168, SEQ ID NO: 169, SEQ ID NO: 170, SEQ ID NO: 171, SEQ ID NO: 172, SEQ ID NO: 173, SEQ ID NO: 174, SEQ ID NO:175, SEQ ID NO: 176, SEQ ID SEQ ID NO: 178, SEQ ID NO: 179, SEQ ID NO: 180, SEQ ID NO: 181, SEQ ID NO: 182, SEQ ID NO: 183, SEQ ID NO:184, SEQ ID NO: 185, SEQ ID NO: 186, SEQ ID NO: 187, SEQ ID NO: 188, SEQ ID NO: 189, SEQ ID NO: 190, SEQ ID NO: 191, SEQ ID NO: 192, SEQ ID NO: 193, SEQ ID NO194, SEQ ID NO: 195, SEQ ID NO: 196, SEQ ID NO: 197, SEQ ID NO: 198, SEQ ID NO: 199, SEQ ID NO: 200, SEQ ID NO: 201, SEQ ID NO: 202, SEQ ID NO: 203, SEQ ID NO: 204, SEQ ID NO: 205, SEQ ID NO: 207, SEQ ID NO: 208, SEQ ID NO: 209, SEQ ID NO: 210, SEQ ID NO: 211, SEQ ID NO: 212, SEQ ID NO: 213, SEQ ID NO: 214, SEQ ID NO:215, SEQ ID NO: 216, SEQ ID NO: 217, SEQ ID NO: 218, SEQ ID NO: 219, SEQ ID NO: 220, SEQ ID NO: 221, SEQ ID NO: 222, SEQ ID NO: 223, SEQ ID NO:224, SEQ ID NO: 225, SEQ ID NO: 226, SEQ ID NO: 227, SEQ ID NO: 228, SEQ ID NO: 229, SEQ ID NO: 230, SEQ ID NO:231, SEQ ID NO: 232, SEQ ID NO: 233, SEQ ID NO: 234 SEQ ID NO: 235, SEQ ID NO: 236, SEQ ID NO: 237, SEQ ID NO: 238, SEQ ID NO: 239, SEQ ID NO: 241, SEQ ID NO: 242, SEQ ID NO: 244, SEQ ID NO: 245, SEQ ID NO:246, SEQ ID NO: 248, SEQ ID NO: 249, SEQ ID NO: 250, SEQ ID NO: 251, SEQ ID NO: 252, SEQ ID NO: 253, SEQ ID NO: 254, SEQ ID NO:255, SEQ ID NO: 256, SEQ ID NO: 257, SEQ ID NO: 258, SEQ ID NO: 259, SEQ ID NO: 260, SEQ ID NO: 261, SEQ ID NO: 262, SEQ ID NO: 263, SEQ ID NO:264, SEQ ID NO: 265, SEQ ID NO: 266, SEQ ID NO: 267, SEQ ID NO: 268, SEQ ID NO: 269, SEQ ID NO: 270, SEQ ID NO: 271, SEQ ID NO: 272, SEQ ID NO: 273, SEQ ID NO: 274 SEQ ID NO: 275, SEQ ID NO: 276, SEQ ID NO: 277, SEQ ID NO: 278, SEQ ID NO: 279, SEQ ID NO: 280, SEQ ID NO: 281, SEQ ID NO: 282, SEQ ID NO: 283, SEQ ID NO: 284, SEQ ID NO: 285, SEQ ID NO: 286, SEQ ID NO: 287, SEQ ID NO: 288, SEQ ID NO: 289, SEQ ID NO: 290, SEQ ID NO: 291, SEQ ID NO: 292, SEQ ID NO: 293, SEQ ID NO: 294, SEQ ID NO:295, SEQ ID NO: 296, SEQ ID NO: 297, SEQ ID NO: 298, SEQ ID NO299, SEQ ID NO: 300, SEQ ID NO: 301, SEQ ID NO: 302, SEQ ID NO: 303, SEQ ID NO:304, SEQ ID NO: 305, SEQ ID NO: 306, SEQ ID NO: 307, SEQ ID NO: 308, SEQ ID NO: 309, SEQ ID NO: 310, SEQ ID NO: 311, SEQ ID NO: 312, SEQ ID NO: 313, SEQ ID NO: 314 SEQ ID NO: 315, SEQ ID NO: 316, SEQ ID NO: 317, SEQ ID NO: 318, SEQ ID NO: 319, SEQ ID NO: 320, SEQ ID NO: 321, SEQ ID NO: 322, SEQ ID NO: 323, SEQ ID NO: 324, SEQ ID NO: 325, SEQ ID NO: 326, SEQ ID NO: 327, SEQ ID NO: 332, SEQ ID NO: 333, SEQ ID NO: 337, SEQ ID NO: 338, SEQ ID NO: 339, SEQ ID NO: 340, SEQ ID NO: 341, SEQ ID NO: 342, SEQ ID NO: 343, SEQ ID NO:344, SEQ ID NO: 345, SEQ ID NO: 346, SEQ ID NO: 347, SEQ ID NO: 348, SEQ ID NO: 349, SEQ ID NO: 350, SEQ ID NO: 351, SEQ ID NO: 352, SEQ ID NO: 353, SEQ ID NO: 354 SEQ ID NO: 355, SEQ ID NO: 356, SEQ ID NO: 357, SEQ ID NO: 358, SEQ ID NO: 359, SEQ ID NO: 360, SEQ ID NO: 361, SEQ ID NO: 362, SEQ ID NO: 363, SEQ ID NO: 364, SEQ ID NO: 365, SEQ ID NO: 366, SEQ ID NO: 367, SEQ ID NO: 368, SEQ ID NO: 369, SEQ ID NO: 370, SEQ ID NO: 371, SEQ ID NO: 372, SEQ ID NO: 373, SEQ ID NO: 374, SEQ ID NO:375, SEQ ID NO: 376, SEQ ID NO: 377, SEQ ID NO: 378, SEQ ID NO: 379, SEQ ID NO: 380, SEQ ID NO: 381, SEQ ID NO: 382, SEQ ID NO383, SEQ ID NO:384, SEQ ID NO: 385, SEQ ID NO: 386, SEQ ID NO: 387, SEQ ID NO: 388, SEQ ID NO: 389, SEQ ID NO: 390, SEQ ID NO: 391, SEQ ID NO: 392, SEQ ID NO: 393, SEQ ID NO: 394 SEQ ID NO: 395, SEQ ID NO: 396, SEQ ID NO: 397, SEQ ID NO: 398, SEQ ID NO: 399, SEQ ID NO: 400, SEQ ID NO: 401, SEQ ID NO: 402, SEQ ID NO: 403, SEQ ID NO: 404, SEQ ID NO: 405, SEQ ID NO: 406, SEQ ID NO: 407, SEQ ID NO: 409, SEQ ID NO: 410, SEQ ID NO:415, SEQ ID NO: 416, SEQ ID NO: 417, SEQ ID NO: 418, SEQ ID NO: 419, SEQ ID NO: 420, SEQ ID NO: 421, SEQ ID NO: 422, SEQ ID NO: 423, SEQ ID NO: 424, SEQ ID NO:425, SEQ ID NO: 426, SEQ ID NO: 427 SEQ ID NO: 428 (this list is sometimes referred to herein as SEQ ID LIST I for brevity). Thus these nucleic acids can contain, in addition to the nucleotides set forth in each SEQ ID NO in the sequence listing, additional nucleotides at either end of the molecule. Such additional nucleotides can be added by any standard method, as known in the art, such as recombinant methods and synthesis methods. Examples of such nucleic acids comprising the nucleotide sequence set forth in any entry of the sequence listing contemplated by this invention include, but are not limited to, for example, the nucleic acid placed into a vector; a nucleic acid having one or more regulatory region (e.g., promoter, enhancer, polyadenylation site) linked to it, particularly in functional manner, i.e. such that an mRNA or a protein can be produced; a nucleic acid including additional nucleic acids of the gene, such as a larger or even full length genomic fragment of the gene, a partial or full length cDNA, a partial or full length RNA. Making and/or isolating such larger nucleic acids is further described below and is well known and standard in the art.

[0033] The invention also provides a nucleic acid encoding the protein encoded by the gene comprising the nucleotide sequence set forth in SEQ ID NO: 1 to 428 (SEQ ID List 1), as well as allelic variants and homologs of each such gene. The gene is readily obtained using standard methods, as described below and as is known and standard in the art. The present invention also contemplates any unique fragment of these genes or of the nucleic acids set forth in any of the sequences listed in SEQ ID LIST 1. Examples of inventive fragments of the inventive genes are the nucleic acids whose sequence is set forth in any of the sequences set forth in SEQ ID LIST 1 (SEQ IDs 1-428). To be unique, the fragment must be of sufficient size to distinguish it from other known sequences, most readily determined by comparing any nucleic acid fragment to the nucleotide sequences of nucleic acids in computer databases, such as GenBank. Such comparative searches are standard in the art. Typically, a unique fragment useful as a primer or probe will be at least about 20 to about 25 nucleotides in length, depending upon the specific nucleotide content of the sequence. Additionally, fragments can be, for example, at least about 30, 40, 50, 75, 100, 200 or 500 nucleotides in length. The nucleic acids can be single or double stranded, depending upon the purpose for which it is intended.

[0034] The present invention further provides a nucleic acid comprising the regulatory region of a gene comprising the nucleotide sequences set forth in SEQ ID NO: 1 to 428 (SEQ ID List 1). Additionally provided is a construct comprising such a regulatory region functionally linked to a reporter gene. Such reporter gene constructs can be used to screen for compounds and compositions that affect expression of the gene comprising the nucleic acids whose sequence is set forth in any of the sequences listed above or in SEQ ID LIST 1.

[0035] The nucleic acids set forth in the sequence listing are typically gene fragments; the entire coding sequence and the entire gene that comprises each fragment are both contemplated herein and are readily obtained by standard methods, given the nucleotide sequences presented in the sequence listing (see, e.g., Sambrook et al., Molecular Cloning: A Laboratory Manual, 2nd Ed., Cold Spring Harbor Laboratory, Cold Spring Harbor, N.Y., 1989; DNA cloning: A Practical Approach, Volumes I and II, Glover, D. M. ed., IRL Press Limited, Oxford, 1985)., To obtain the entire genomic gene, briefly, a nucleic acid whose sequence is set forth in any of the sequences set forth above, or a smaller fragment thereof, is utilized as a probe to screen a genomic library under high stringency conditions, and isolated clones are sequenced. Therefore, once a genomic locus has been disrupted by the methods of the present invention, and a partial sequence for the disrupted gene is obtained, one of skilled in the art would know how to isolate the entire gene comprising the partial sequence and thus would be in possession of the full length sequence of the gene, including its regulatory regions. For example, once the sequence of the new clone is determined, a probe can be devised from a portion of the new clone not present in the previous fragment and hybridized to the library to isolate more clones containing fragments of the gene. In this manner, by repeating this process in organized fashion, one can “walk” along the chromosome and eventually obtain nucleotide sequence for the entire gene. Similarly, one can use portions of the present fragments, or additional fragments obtained from the genomic library, that contain open reading frames to screen a cDNA library to obtain a cDNA having the entire coding sequence of the gene. Repeated screens can be utilized as described above to obtain the complete sequence from several clones if necessary. The isolates can then be sequenced to determine the nucleotide sequence by standard means such as dideoxynucleotide sequencing methods (see, e.g., Sambrook et al., Molecular Cloning: A Laboratory Manual, 2nd Ed., Cold Spring Harbor Laboratory, Cold Spring Harbor, N.Y., 1989).

[0036] The present genes were isolated from rat; however, homologs in any desired species, preferably mammalian, such as human, are provided or can readily be obtained by screening a human library, genomic or cDNA, with a probe comprising sequences of the nucleic acids set forth in the sequence listing herein, or fragments thereof, and isolating genes specifically hybridizing with the probe under preferably relatively high stringency hybridization conditions. For example, high salt conditions (e.g., in 6×SSC or 6×SSPE) and/or high temperatures of hybridization can be used. For example, the stringency of hybridization is typically about 5° C. to 20° C. below the Tₘ (the melting temperature at which half of the molecules dissociate from its partner) for the given chain length. As is known in the art, the nucleotide composition of the hybridizing region factors in determining the melting temperature of the hybrid. For 20 mer probes, for example, the recommended hybridization temperature is typically about 55-58° C. Additionally, the rat sequence can be utilized to devise a probe for a homolog in any specific animal by determining the amino acid sequence for a portion of the rat protein, and selecting a probe with optimized codon usage to encode the amino acid sequence of the homolog in that particular animal. Any isolated gene can be confirmed as the targeted gene by sequencing the gene to determine it contains the nucleotide sequence listed herein as comprising the gene. Any homolog can be confirmed as a homolog by its functionality. Homologs can also be obtained by comparing the rat sequences to sequences from other species on readily available databases. For example, the rat sequence can be compared with mouse sequences to obtain a homolog. The homolog obtained from this comparison can then be compared to human sequences or other mammalian sequences to obtain additional homologs. The rat sequences can also be compared directly with human sequences or any other mammalian sequences on databases.

[0037] Additionally contemplated by the present invention are nucleic acids, from any desired species, preferably mammalian and more preferably human, having 98%, 95%, 90%, 85%, 80%, 70%, 60%, or 50% homology, or greater, in the region of homology, to a region in an exon of a nucleic acid encoding the protein encoded by the gene comprising the nucleotide sequence set forth in any of SEQ ID NO:1 through SEQ ID 428 of the sequence listing or to homologs thereof. Also contemplated by the present invention are nucleic acids, from any desired species, preferably mammalian and more preferably human, having 98%, 95%, 90%, 85%, 80%, 70%, 60%, or 50% homology, or greater, in the region of homology, to a region in an exon of a nucleic acid comprising the nucleotide sequence set forth in any of SEQ ID NO:1 through SEQ ID 418 of the sequence listing or to homologs thereof. These genes can be synthesized or obtained by the same methods used to isolate homologs, with stringency of hybridization and washing, if desired, reduced accordingly as homology desired is decreased, and further, depending upon the G-C or A-T richness of any area wherein variability is searched for. Allelic variants of any of the present genes or of their homologs can readily be isolated and sequenced by screening additional libraries following the protocol above. Methods of making synthetic genes are described in U.S. Pat. No. 5,503,995 and the references cited therein.

[0038] The nucleic acid encoding any selected protein of the present invention can be any nucleic acid that functionally encodes that protein. For example, to functionally encode, i.e., allow the nucleic acid to be expressed, the nucleic acid can include, for example, exogenous or endogenous expression control sequences, such as an origin of replication, a promoter, an enhancer, and necessary information processing sites, such as ribosome binding sites, RNA splice sites, polyadenylation sites, and transcriptional terminator sequences. Preferred expression control sequences can be promoters derived from metallothionine genes, actin genes, immunoglobulin genes, CMV, SV40, adenovirus, bovine papilloma virus, etc. Expression control sequences can be selected for functionality in the cells in which the nucleic acid will be placed. A nucleic acid encoding a selected protein can readily be determined based upon the amino acid sequence of the selected protein, and, clearly, many nucleic acids will encode any selected protein.

[0039] The present invention additionally provides a nucleic acid that selectively hybridizes under stringent conditions with a nucleic acid encoding the protein encoded by the gene comprising the nucleotide sequence set forth in any sequence listed herein (i.e., any of SEQ ID NO:1 through SEQ ID NO:428). This hybridization can be specific. The degree of complementarity between the hybridizing nucleic acid and the sequence to which it hybridizes should be at least enough to exclude hybridization with a nucleic acid encoding an unrelated protein. Thus, a nucleic acid that selectively hybridizes with a nucleic acid of the present protein coding sequence will not selectively hybridize under stringent conditions with a nucleic acid for a different, unrelated protein, and vice versa. Typically, the stringency of hybridization to achieve selective hybridization involves hybridization in high ionic strength solution (6×SSC or 6×SSPE) at a temperature that is about 12-25° C. below the Tₘ (the melting temperature at which half of the molecules dissociate from its partner) followed by washing at a combination of temperature and salt concentration chosen so that the washing temperature is about 5° C. to 20° C. below the Tₘ of the hybrid molecule. The temperature and salt conditions are readily determined empirically in preliminary experiments in which samples of reference DNA immobilized on filters are hybridized to a labeled nucleic acid of interest and then washed under conditions of different stringencies. Hybridization temperatures are typically higher for DNA-RNA and RNA-RNA hybridizations. The washing temperatures can be used as described above to achieve selective stringency, as is known in the art. (Sambrook et al., Molecular Cloning: A Laboratory Manual, 2nd Ed., Cold Spring Harbor Laboratory, Cold Spring Harbor, N.Y., 1989; Kunkel et al. Methods Enzymol. 1987:154:367, 1987). Nucleic acid fragments that selectively hybridize to any given nucleic acid can be used, e.g., as primers and or probes for further hybridization or for amplification methods (e.g., polymerase chain reaction (ICR), ligase chain reaction (LCR)). A preferable stringent hybridization condition for a DNA:DNA hybridization can be at about 68° C. (in aqueous solution) in 6×SSC or 6×SSPE followed by washing at 68° C.

[0040] The present invention additionally provides a protein encoded by a nucleic acid encoding the protein encoded by the gene comprising any of the nucleotide sequences set forth herein (i.e., any of SEQ ID NO: 1 through SEQ ID NO:428). The protein can be readily obtained by any of several means. For example, the nucleotide sequence of coding regions of the gene can be translated and then the corresponding polypeptide can be synthesized mechanically by standard methods. Additionally, the coding regions of the genes can be expressed or synthesized, an antibody specific for the resulting polypeptide can be raised by standard methods (see, e.g., Harlow and Lane, Antibodies: A Laboratory Manual, Cold Spring Harbor Laboratory, Cold Spring Harbor, N.Y., 1988), and the protein can be isolated from other cellular proteins by selective hybridization with the antibody. This protein can be purified to the extent desired by standard methods of protein purification (see, e.g., Sambrook et al., Molecular Cloning: A Laboratory Manual, 2nd Ed., Cold Spring Harbor Laboratory, Cold Spring Harbor, N.Y., 1989). The amino acid sequence of any protein, polypeptide or, peptide of this invention can be deduced from the nucleic acid sequence, or it can be determined by sequencing an isolated or recombinantly produced protein.

[0041] The terms “peptide,” “polypeptide” and “protein” are used interchangeably herein and refer to a polymer of amino acids and includes full-length proteins and fragments thereof. As used in the specification and in the claims, “a” can mean one or more, depending upon the context in which it is used. An amino acid residue is an amino acid formed upon chemical digestion (hydrolysis) of a polypeptide at its peptide linkages. The amino acid residues described herein are preferably in the L isomeric form. However, residues in the D-isomeric form can be substituted for any L-amino acid residue, as long as the desired functional property is retained by the polypeptide. Standard polypeptide nomenclature (described in J. Biol. Chem., 243:3552-59 (1969) and adopted at 37 CFR §1.822(b)) is used herein.

[0042] As will be appreciated by those skilled in the art, the invention also includes those polypeptides having slight variations in amino acid sequences or other properties. Amino acid substitutions can be selected by known parameters to be neutral (see, e.g., Robinson W E Jr, and Mitchell W M., AIDS 4:S151-S162 (1990)). Such variations may arise naturally as allelic variations (e.g., due to genetic polymorphism) or may be produced by human intervention (e.g., by mutagenesis of cloned DNA sequences), such as induced point, deletion, insertion and substitution mutants. Minor changes in amino acid sequence are generally preferred, such as conservative amino acid replacements, small internal deletions or insertions, and additions or deletions at the ends of the molecules. Substitutions may be designed based on, for example, the model of Dayhoff, et al. (in Atlas of protein Sequence and Structure 1978, Nat'l Biomed. Res. Found., Washington, D.C.). These modifications can result in changes in the amino acid sequence, provide silent mutations, modify a restriction site, or provide other specific mutations. Likewise, such amino acid changes result in a different nucleic acid encoding the polypeptides and proteins. Thus, alternative nucleic acids are also contemplated by such modifications.

[0043] The present invention also provides cells containing a nucleic acid of the invention. A cell containing a nucleic acid encoding a protein typically can replicate the DNA and, further, typically can express the encoded protein. The cell can be a prokaryotic cell, particularly for the purpose of producing quantities of the nucleic acid, or a eukaryotic cell, particularly a mammalian cell. The cell is preferably a mammalian cell for the purpose of expressing the encoded protein so that the resultant produced protein has mammalian protein processing modifications.

[0044] Nucleic acids of the present invention can be delivered into cells by any selected means, in particular depending upon the purpose of the delivery of the compound and the target cells. Many delivery means are well-known in the art. For example, electroporation, calcium phosphate precipitation, microinjection, cationic or anionic liposomes, and liposomes in combination with a nuclear localization signal peptide for delivery to the nucleus can be utilized, as is known in the art.

[0045] The present invention also contemplates that the mutated cellular genes necessary for viral growth, produced by the present method, as well as cells containing these mutants can also be useful. These mutated genes and cells containing them can be isolated and/or produced according to the methods herein described and using standard methods.

[0046] It should be recognized that the sequences set forth herein may contain minor sequencing errors. Such errors can be corrected, for example, by using the hybridization procedure described above with various probes derived from the described sequences such that the coding sequence can be reisolated and resequenced.

[0047] As described in the examples, the present invention provides the discovery of a “serum survival factor” present in serum that is necessary for the survival of certain persistently virally infected cells. Isolation and characterization of this factor have shown it to be a protein, to have a molecular weight of between about 50 kD and 100 kD, to resist inactivation in low pH (e.g., pH2) and chloroform extraction, to be inactivated by boiling for about 5 minutes and in low ionic strength solution (e.g., about 10 mM to about 50 mM). The present invention thus provides a purified mammalian serum protein having a molecular weight of between about 50 kD and 100 kD which resists inactivation in low pH and resists inactivation by chloroform extraction, which inactivates when boiled and inactivates in low ionic strength solution, and which when removed from a cell culture comprising cells persistently infected with reovirus selectively substantially prevents survival of cells persistently infected with reovirus. The factor, fitting the physical characteristics described above, can readily be verified by adding it to non-serum-containing medium (which previously could not support survival of persistently virally infected cells) and determining whether this medium with the added putative factor can now support persistently virally infected cells, particularly cells persistently infected with reovirus. As used herein, a “purified” protein means the protein is at least of sufficient purity such that an approximate molecular weight can be determined.

[0048] The amino acid sequence of the protein can be elucidated by standard methods. For example, an antibody to the protein can be raised and used to screen an expression library to obtain nucleic acid sequence coding the protein. This nucleic acid sequence is then simply translated into the corresponding amino acid sequence. Alternatively, a portion of the protein can be directly sequenced by standard amino acid sequencing methods (amino-terminus sequencing). This amino acid sequence can then be used to generate an array of nucleic acid probes that encompasses all possible coding sequences for a portion of the amino acid sequence. The array of probes is used to screen a cDNA library to obtain the remainder of the coding sequence and thus ultimately the corresponding amino acid sequence.

[0049] The present invention also provides methods of detecting and isolating additional serum survival factors. For example, to determine if any known serum components are necessary for viral growth, the known components can be inhibited in, or eliminated from, the culture medium, and it can be observed whether viral growth is inhibited by determining if persistently infected cells do not survive. One can add the factor back (or remove the inhibition) and determine whether the factor allows for viral growth.

[0050] Additionally, other, unknown serum components can also be found to be essential for viral growth. Serum can be fractionated by various standard means, and fractions added to serum free medium to determine if a factor is present in a reaction that allows viral growth previously inhibited by the lack of serum. Fractions having this activity can then be further fractionated until the factor is relatively free of other components. The factor can then be characterized by standard methods, such as size fractionation, denaturation and/or inactivation by various means, etc. Preferably, once the factor has been purified to a desired level of purity, it is added to cells in serum free medium to confirm that it bestows the function of allowing virus to grow when serum-free medium alone did not. This method can be repeated to confirm the requirement for the specific factor for any desired virus, since each serum factor found to be required by any one virus can also be required by many other viruses. In general, the closer the viruses are related and the more similar the infection modes of the viruses, the more likely that a factor required by one virus will be required by the other.

[0051] The present invention also provides methods of treating virus infections utilizing applicants' discoveries. The subject of any of the herein described methods can be any animal, preferably a mammal, such as a human, a veterinary animal, such as a cat, dog, horse, pig, goat, sheep, or cow, or a laboratory animal, such as a mouse, rat, rabbit, or guinea pig, depending upon the virus.

[0052] The present invention provides a method of reducing or inhibiting, and thereby treating, a viral infection in a subject, comprising administering to the subject an inhibiting amount of a composition that inhibits functioning of the serum protein described herein, i.e. the serum protein having a molecular weight of between about 50 kD and 100 kD which resists inactivation in low pH and resists inactivation by chloroform extraction, which inactivates when boiled and inactivates in low ionic strength solution, and which when removed from a cell culture comprising cells persistently infected with the virus prevents survival of at least some cells persistently infected with the virus, thereby treating the viral infection. The composition can comprise, for example, an antibody that specifically binds the serum protein, or an antisense RNA that binds an RNA encoded by a gene functionally encoding the serum protein.

[0053] The method of reducing or inhibiting viral infection in a subject, can use a vector that is targeted to one of the genes (or loci) identified herein as associate with viral growth (e.g., SEQ ID NOS: 1-428). The method call for administration of a vector targeted to the sequence, whereby the vector can disrupt the gene and thereby inhibit the viral growth that is dependent on the disrupted gene. The vector can be targeted by containing homologous sequences such that an insertional or deletional mutation takes place at the target site upon administration of the vector.

[0054] Any virus capable of infecting the selected subject to be treated can be treated by the present method. As described above, any serum protein or survival factor found by the present methods to be necessary for growth of any one virus can be found to be necessary for growth of many other viruses. For any given virus, the serum protein or factor can be confirmed to be required for growth by the methods described herein. The cellular genes identified by the examples using reovirus, a mammalian pathogen, and a rat cell system have general applicability to other virus infections that include all of the known as well as yet to be discovered human pathogens, including, but not limited to: human immunodeficiency viruses (e.g., HIV-1, HIV-2); parvovirus; papillomaviruses; hantaviruses; SARS (severe acute respiratory syndrome) virus influenza viruses (e.g., influenza A, B and C viruses);, hepatitis viruses A to G; caliciviruses; astroviruses; rotaviruses; coronaviruses, such as human respiratory coronavirus; picornaviruses, such as human rhinovirus and enterovirus; ebola virus; human herpesvirus (e.g., HSV-1-9); human cytomegalovirus; human adenovirus; Epstein-Barr virus; hantaviruses; for animal, the animal counterpart to any above listed human virus, animal retroviruses, such as simian immunodeficiency virus, avian immunodeficiency virus, bovine immunodeficiency virus, feline immunodeficiency virus, equine infectious anemia virus, caprine arthritis encephalitis virus or visna virus.

[0055] A protein inhibiting amount of the composition can be readily determined, such as by administering varying amounts to cells or to a subject and then adjusting the effective amount for inhibiting the protein according to the volume of blood or weight of the subject. Compositions that bind to the protein can be readily determined by running the putatively bound protein on a protein gel and observing an alteration in the protein's migration through the gel. Inhibition of the protein can be determined by any desired means such as adding the inhibitor to complete media used to maintain persistently infected cells and observing the cells' viability. The composition can comprise, for example, an antibody that specifically binds the serum protein. Specific binding by an antibody means that the antibody can be used to selectively remove the factor from serum or inhibit the factor's biological activity and can readily be determined by radio immune assay (RIA), bioassay, or enzyme-linked immunosorbant (ELISA) technology.

[0056] The identification of cellular genes that are associated with the propogation of intracellular pathogens allows for effective targeting at the level of transcription, translation, processing, or protein function (phosphorylation, glycosylation, protein-protein interactions, etc.). There are examples of each. Many of these are aimed at the viral proteins or their untranslated DNA, or RNA. As there is greater genetic instability in the pathogen that the host, these targets are more prone to mutation and escape from the effect of the therapeutic approach. Host targets are more likely to be stable and therefore may be more practical, if the target is not conditionally lethal when mutant. As the process of selection utilized in the approach taken in this patent relies upon cellular proliferation after the mutation has been made, the target for a therapeutic is unlikely to be lethal when mutant. Thus, the composition can comprise, for example, an antisense RNA or an siRNA (small interfering RNA (siRNA)) that specifically binds an RNA encoded by the gene encoding the serum protein. Antisense RNAs can be synthesized and used by standard methods (e.g., Antisense RNA and DNA, D. A. Melton, Ed., Cold Spring Harbor Laboratory, Cold Spring Harbor, N.Y. (1988)).

[0057] Antisense molecules against nucleic acids encoding the ANNEXIN I, ANNEXIN II and ANNEXIN III proteins are provided and can be used to inhibit the expression of the targeted protein. As will be understood by those of skill in the art, antisense molecules are oligonucleotides that are complements or partial complements to nucleic acid sequence that encodes or is necessary for the expression of the protein whose expression is to be inhibited. For example, antisense molecules that can be used to inhibit the expression of these proteins include any oligonucleotide that is complementary to the nucleic acid encoding the particular protein. For example, for inhibiting the expression of ANNEXIN I, an antisense oligonucleotide complementary or partially complementary to, but not limited to, SEQ ID NO: 65 or a portion thereof can be used to inhibit ANNEXIN I expression. Particular antisense oligonucleotides can form duplexes that persist at an appreciable level, thereby reducing the expression of the targeted gene, under selected conditions. Examples of antisense targeting ANNEXIN I protein expression can include an oligonucleotide comprising the complement of SEQ ID NO:65 or portions of the complement to SEQ ID NO:65. Particular examples of such antisense molecules for ANNEXIN I protein would include; AACAAGTCAAATGCT, AACAAGTCAAATGCTTTATA,

### GTCAAATGCTTTATA,

### TTATATATTTGAGT T, TTATATATTTGAGTTAGGGA,

### TTTGAGTTAGGGAACATGTATAT, CATGTATATGTCAAAAATAAAAAT,

### TGCACATTGAAACCCTTATG, TTCCACGTTTATCTATTTT, and

[0058] GGAAACGTTAATGACAGAAAC. Similarly, for inhibiting the expression of ANNEXIN II protein, antisense molecules that inhibit the expression of ANNEXIN II protein can include any oligonucleotide that is complementary to the nucleic acid encoding ANNEXIN II protein such as, but not limited to, SEQ ID NO: 41. Particular examples of such antisense molecules for ANNEXIN II protein would include;

### AAAAGGCGGACAAGGG, CTTCCNGACNCCCCNAAGCC,

### CGAANCGGAAGGGC, GCCCGCCCGAA, GGCCGACTCTCTGCCCGCC, and

### CCCGGAAAGAGGACAGCG.

[0059] Similarly, for inhibiting the expression of ANNEXIN III protein, antisense molecules that inhibit the expression of ANNEXIN III protein can include any oligonucleotide that is complementary to the nucleic acid encoding ANNEXIN II protein such as, but not limited to, SEQ ID NO: 188. Particular examples of such antisense molecules for ANNEXIN III protein would include;

### GGTTGGGCCAAAAA, TTAANAAACCGTTCACCCC,

### AACCGGTGGTTTGTTGCCGG, GATAACTCACTGCTG,

### CTTCTCTTGAACACACCTCCTGGGG, and GCGAAAGGCCCTAACAATAG.

[0060] Similarly, for any other protein encoding genes, such as, but not limited to, the IGF2BP 5 protease (prss11) genes, antisense molecules can be designed as is illustrated above for the ANNEXIN I, II and III proteins by those of skill in the art. For example, the antisense molecule to be used can be greater than 14, 15, 16, 17, 18, 20, 22, 24, 26, 28, 30, 34, 38, 42, 50, 60, 70, 80 or 90 nucleotides in length. The antisense molecule to be used can be less than 150, 125, 100, 90, 80, 70, 60, 50, 42, 38, 34, 30, 28, 26, 24, 22, 20, 18, 17, 16, or 15 nucleotides in length. Antisense molecules can include mismatches or non-Watson-Crick base pairings with the target sequence of the targeted gene. The number of mismatches can be greater than 0, 1, 2, 3, 4, 5, 6, 7, 8, 9, 10, 12, 14, 16, 18 or 20 nucleotides. The number of mismatches can be less than 20, 18, 16, 14, 12, 10, 9, 8, 7, 6, 5, 4, 3, 2 or 1 nucleotides. The level of mismatches in the sequence of the antisense molecule can be more than 0.5, 1, 2, 3, 4, 5, or 7% of the total number of base pairs. The level of mismatches in the sequence of the antisense molecule can be less than 10, 7, 5, 4, 3, 2, or 1% of the total number of base pairs. Further, antisense sequences can include further contiguous sequence on either the 5′ or 3′ ends of the molecules in addition to that corresponding to complementary or partially complementary sequence as described herein. For example, an antisense molecule can be linked to further sequence that is not a complement to the target sequence.

[0061] In other embodiments, oligonucleotides that function in a manner different from antisense can be used. For example, an RNA for use as an interfering RNA such as siRNA can be designed based on the sequence of the encoded protein whose expression is to be inhibited or reduced. The resulting interfering RNA can be used in a manner similar to that of the antisense molecules to reduce or inhibit the expression of particular proteins such as, but not limited to, those described herein, particularly those noted in the Table 2 and their human homologs. The following references relating to the phenomenon of RNA interference and its use to silence gene expression are incorporated herein for their teachings, particularly their teachings of how to silence expression of genes, putative genes, or potential genes, by transfecting or transforming cells with RNA molecules; Fire et al., “Potent and specific genetic interference by double-stranded RNA in Caenorhabditis elegans,” Nature 391: 806-811 (1998); Kennerdell and Carthew, “Use of dsRNA-mediated interference to demonstrate that frizzled and frizzled 2 act in the wingless pathway,” Cell 95: 1017-1026 (1998); Ngo et al., “Double-stranded RNA induces mRNA degradation in Trypanosoma brucei,” Proc. Natl. Acad. Sci. USA 95: 14687-14692 (1998); Timmons and Fire, “Specific interference by ingested dsRNA,” Nature 395: 854 (1998); Yang et al., “Specific double-stranded RNA interference in undifferentiated mouse embryonic stem cells,” Mol. Cell. Biol. 21: 7807-7816 (2001); Caplen et al., “Specific inhibition of gene expression by small double-stranded RNAs in invertebrate and vertebrate systems,” Proc. Natl. Acad. Sci. USA 98: 9742-9747 (2001); Elbashir et al., “Duplexes of 21-nucleotide RNAs mediate RNA interference in mammalian cell culture,” Nature 411: 494-498 (2001); Hammond et al., “An RNA-directed nuclease mediates post-transcriptional gene silencing in Drosophila cells,” Nature 404: 293-296 (2000); Zamore et al., “RNAi:double-stranded RNA directs the ATP-dependent cleavage of mRNA at 21-33 nucleotide intervals,” Cell 101: 25-33 (2000); Bernstein et al., “Role for a bidentate ribonuclease in the initiation step of RNA interference,” Nature 409: 363-366 (2001); Nykanen et al., “ATP requirements and small interfering RNA structure in the RNA interference pathway,” Cell 107: 309-321 (2001); Elbashir et al., “RNA interference is mediated by 21 and 22-nucleotide RNAs,” Genes Dev. 15:188-200 (2001); Lipardi et al., “RNAi as random degradative PCR, siRNA primers convert mRNA into dsRNAs that are degraded to generate new siRNAs,” Cell 107: 297-307 (2001); Sijen et al., “On the role of RNA amplification in dsRNA-triggered gene silencing,” Cell 107: 465-476 (2001); Grishok et al., “Genes and mechanisms related to RNA interference regulate expression of the small temporal RNAs that control C. elegans developmental tiring,” Cell 106: 23-34 (2001); Aravin et al., “Double-stranded RNA-mediated silencing of genomic tandem repeats and transposable elements in the D. melanogaster germline,” Curr. Biol. 11: 1017-1027 (2001); and Hutvagner and Zamore, “RNAi: nature abhors a double-strand,” Curr. Opinion Genetics Develop. 12: 225-232 (2002). Examples of effective therapies include the following.

[0062] CCR5 has a target for siRNA. CCR5 is a co-receptor (cellular gene product) necessary for HIV entry into macrophage cell lines (Qin X F, An D S, Chen I S, Baltimore D., Inhibiting HIV-1 infection in human T cells by lentiviral-mediated delivery of small interfering RNA against CCR5, Proc Natl Acad Sci USA 2003 Jan. 7; 100(1): 183-8). Double-stranded RNAs, approximately 21 nucleotides long, are recognized as powerful reagents to reduce the expression of specific genes. To use them as reagents to protect cells against viral infection, effective methods for introducing siRNAs into primary cells are required. Here, we describe success in constructing a lentivirus-based vector to introduce siRNAs against the HIV-1 coreceptor, CCR5, into human peripheral blood T lymphocytes. With high-titer vector stocks, >40% of the peripheral blood T lymphocytes could be transduced, and the expression of a potent CCR5-siRNA resulted in up to 10-fold inhibition of CCR5 expression on the cell surface over a period of 2 weeks in the absence of selection. In contrast, the expression of another major HIV-1 coreceptor, CXCR4, was not affected. Importantly, blocking CCR5 expression by siRNAs provided a substantial protection for the lymphocyte populations from CCR5-tropic HIV-1 virus infection, dropping infected cells by 3- to 7-fold; only a minimal effect on infection by a CXCR4-tropic virus was observed. Thus, our studies demonstrate the feasibility and potential of lentiviral vector-mediated delivery of siRNAs as a general means of intracellular immunization for the treatment of HIV-1 and other viral diseases.

[0063] A viral target for Influenza A: Ge Q, McManus M T, Nguyen T, Shen C H, Sharp P A, Eisen H N and Chen, J. (Proc Natl Acad Sci USA 2003 Mar. 4; 100(5):2718-23, RNA interference of influenza virus production by directly targeting mRNA for degradation and indirectly inhibiting all viral RNA transcription) disclose that Influenza A virus causes widespread infection in the human respiratory tract, but existing vaccines and drug therapy are of limited value. Here we show that short interfering RNAs (siRNAs) specific for conserved regions of the viral genome can potently inhibit influenza virus production in both cell lines and embryonated chicken eggs. The inhibition depends on the presence of a functional antisense strand in the siRNA duplex, suggesting that viral mRNA is the target of RNA interference. However, siRNA specific for nucleocapsid (NP) or a component of the RNA transcriptase (PA) abolished the accumulation of not only the corresponding mRNA but also virion RNA and its complementary RNA. These siRNAs also broadly inhibited the accumulation of other viral, but not cellular, RNAs. The findings reveal that newly synthesized NP and PA proteins are required for influenza virus transcription and replication and provide a basis for the development of siRNAs as prophylaxis and therapy for influenza infection in humans.

[0064] The present application shows the disruption of KLF6. Yoon H S, Chen X and Yang V W (J Biol Chem 2003 Jan. 24; 278(4):2101-5, Kruppel-like factor 4 mediates p53-dependent G1/S cell cycle arrest in response to DNA damage) show siRNA effectiveness on a related protein KLF4. The tumor suppressor p53 is required for the maintenance of genomic integrity following DNA damage. One mechanism by which p53 functions is to induce a block in the transition between the G(1) and S phase of the cell cycle. Previous studies indicate that the Kruppel-like factor 4 (KLF4) gene is activated following DNA damage and that such activation depends on p53. In addition, enforced expression of KLF4 causes G(1)/S arrest. The present study examines the requirement of KLF4 in mediating the p53-dependent cell cycle arrest process in response to DNA damage. We show that the G(1) population of a colon cancer cell line, HCT116, that is null for the p53 alleles (−/−) was abolished following gamma irradiation compared with cells with wild-type p53 (+/+). Conditional expression of KL4 in irradiated HCT116 p53−/− cells restored the G(1) cell population to a level similar to that seen in irradiated HCT116 p53+/+ cells. Conversely, treatment of HCT116 p53+/+ cells with small interfering RNA (siRNA) specific for KLF4 significantly reduced the number of cells in the G(1) phase following gamma irradiation compared with the untreated control or those treated with a nonspecific siRNA. In each case the increase or decrease in KLT4 level because of conditional induction or siRNA inhibition, respectively, was accompanied by an increase or decrease in the level of p21(WAF1/CIP1). Results of our study indicate that KLF4 is an essential mediator of p53 in controlling G(1)/S progression of the cell cycle following DNA damage.

[0065] Once the genes are known, the present approach can be used to protect humans (and other animals from disease (Olson K E, Adelman Z N, Travanty E A, Sanchez-Vargas I, Beaty B J and Blair C D, Developing arbovirus resistance in mosquitoes, Insect Biochem Mol Biol 2002 October; 32(10): 1333-43). Diseases caused by arthropod-borne viruses are increasingly significant public health problems, and novel methods are needed to control pathogen transmission The hypothesis underlying the research described here is that genetic manipulation of Aedes aegypti mosquitoes can profoundly and permanently reduce their competence to transmit dengue viruses to human hosts. Recent key findings now allow us to test the genetic control hypothesis. We have identified viral genome-derived RNA segments that can be expressed in mosquito midgets and salivary glands to ablate homologous virus replication and transmission. We have demonstrated that both transient and heritable expression of virus-derived effector RNAs in cultured mosquito cells can silence virus replication, and have characterized the mechanism of RNA-mediated resistance. We are now developing virus-resistant mosquito lines by transformation with transposable elements that express effector RNAs from mosquito-active promoters.

[0066] The targeting of IGF2 (one of the genes disrupted in the present method) has produced good results in cancer of the liver (Yao X, Hu J F, Daniels M, Shiran H, Zhou X, Yan H, Lu H, Zeng Z, Wang Q, Li T, Hoffman A R, A methylated oligonucleotide inhibits IGF2 expression and enhances survival in a model of hepatocellular carcinoma, J Clin Invest 2003 January; 111(2):265-73). IGF2 is a mitogenic peptide that has been implicated in hepatocellular oncogenesis. Since the silencing of gene expression is frequently associated with cytosine methylation at cytosine-guanine (CpG) dinucleotides, we designed a methylated oligonucleotide (MON1) complementary to a region encompassing IGF2 promoter P4 in an attempt to induce DNA methylation at that locus and diminish IGF2 mRNA levels. MON1 specifically inhibited IGF2 mRNA accumulation in vitro, whereas an oligonucleotide (ON1) with the same sequence but with nonmethylated cytosines had no effect on IGF2 mRNA abundance. MON1 treatment led to the specific induction of de novo DNA methylation in the region of IGF2 promoter hP4. Cells from a human hepatocellular carcinoma (HCC) cell line, Hep 3B, were implanted into the livers of nude mice, resulting in the growth of large tumors. Animals treated with MON1 had markedly prolonged survival as compared with those animals treated with saline or a truncated methylated oligonucleotide that did not alter IGF2 mRNA levels in vitro. This study demonstrates that a methylated sense oligonucleotide can be used to induce epigenetic changes in the IGF2 gene and that inhibition of IGF2 mRNA accumulation may lead to enhanced survival in a model of HCC.

[0067] The present methods provide a method of screening a compound for treating a viral infection, comprising administering the compound to a cell containing a cellular gene functionally encoding a gene product necessary for reproduction of the virus in the cell but not necessary for survival of the cell and detecting level of the gene product produced, a decrease or elimination of the gene product indicating a compound for treating the viral infection. The present methods also provide a method of screening a compound for effectiveness in treating a viral infection, comprising administering the compound to a cell containing a cellular gene functionally encoding a gene product necessary for reproduction of the virus in the cell but not necessary for survival of the cell and detecting the level of the gene product produced, a decrease or elimination of the gene product indicating a compound effective for treating the viral infection. The cellular gene can be, for example, any gene provided herein, i.e., any of the genes comprising the nucleotide sequences set forth in any of the sequences in SEQ ID LIST 1 or any other gene obtained using the methods provided herein for obtaining such genes. Level of the gene product can be measured by any standard means, such as by detection with an antibody specific for the protein. The level of gene product can be compared to the level of the gene product in a control cell not contacted with the compound. The level of gene product can be compared to the level of the gene product in the same cell prior to addition of the compound. Activity of function, can be measured by any standard means, such as by enzymatic assays that measure the conversion of a substrate to a product or binding assays that measure the binding of a protein to a nucleic acids, for example. Relatedly, the regulatory region of the gene can be functionally linked to a reporter gene and compounds can be screened for inhibition of the reporter gene. Such reporter constructs are described herein.

[0068] Examples of gene products whose activity/function can be measured and which are disclosed herein include, but are not limited to tristetraprolin (human ZFP-36), 6-pyruvoyl-tetrahydropterin synthase, a eukaryotic DnaJ-like protein, ID3 (inhibitor of DNA binding 3), N-acetylglucos-aminyltransferase I (mGAT-1), cleavage stimulation factor (CSTF2), TAK1 binding protein, human zinc transcription factor ZPF207, Dlx2, Smad7 (Mad-related protein), and P-glycoprotein (mdr1b). The activity can be compared to the activity in a control cell not contacted with the compound or in the same cell prior to addition of the compound.

[0069] The present invention also provides a method of screening a compound for effectiveness in treating or preventing a viral infection comprising contacting the compound with the gene product of a cellular gene comprising a nucleic acid of SEQ ID LIST 1, or any homolog thereof, or a gene identified in Table 1 or 2 or otherwise in this application, and detecting the function of the gene product, a decrease or elimination of the function indicating a compound effective for treating or preventing viral infection. Examples of gene products that can be utilized in these methods include, but are not limited to tristetraprolin (human ZFP-36), 6-pyruvoyl-tetrahydropterin synthase, a eukaryotic DnaJ-like protein, ID3 (inhibitor of DNA binding 3), N-acetylglucos-aminyltransferase I (mGAT-1), cleavage stimulation factor (CSTF2), TAK1 binding protein, CTCF, human zinc transcription factor ZPF207, Dlx2, Smad7 (Mad-related protein), and P-glycoprotein (mdr1b). The activity can be compared to the activity in a control cell not contacted with the compound or in the same cell prior to addition of the compound.

[0070] The present invention provides a method of selectively eliminating cells persistently infected with a virus from an animal cell culture capable of surviving for a first period of time in the absence of serum, comprising propagating the cell culture in the absence of serum for a second time period which a persistently infected cell cannot survive without serum, thereby selectively eliminating from the cell culture cells persistently infected with the virus. The second time period should be shorter than the first time period. Thus one can simply eliminate serum from a standard culture medium composition for a period of time (e.g. by removing serum containing medium from the culture container, rinsing the cells, and adding serum-free medium back to the container), then, after a time of serum starvation, return serum to the culture medium. Alternatively, one can inhibit a serum survival factor from the culture in place of the step of serum starvation. Furthermore, one can instead interfere with the virus-factor interaction. Such a viral elimination method can periodically be performed for cultured cells to ensure that they remain virus-free. The time period of serum removal can greatly vary, with a typical range being about 1 to about 30 days; a preferable period can be about 3 to about 10 days, and a more preferable period can be about 5 days to about 7 days. This time period can be selected based upon ability of the specific cell to survive without serum as well as the life cycle of the virus, e.g., for reovirus, which has a life cycle of about 24 hours, 3 days' starvation of cells provides dramatic results.

[0071] Furthermore, the time period can be shortened by also passaging the cells during the starvation; in general, increasing the number of passages can decrease the time of serum starvation (or serum factor inhibition) needed to get full clearance of the virus from the culture. While passaging, the cells typically are exposed briefly to serum (typically for about 3 to about 24 hours). This exposure both stops the action of the trypsin used to dislodge the cells and stimulates the cells into another cycle of growth, thus aiding in this selection process. Thus a starvation/serum cycle can be repeated to optimize the selective effect. Other standard culture parameters, such as confluency of the cultures, pH, temperature, etc. can be varied to alter the needed time period of serum starvation (or serum survival factor inhibition). This time period can readily be determined for any given viral infection by simply removing the serum for various periods of time, then testing the cultures for the presence of the infected cells (e.g., by ability to survive in the absence of serum and confirmed by quantitating virus in cells by standard virus titration and immunohistochemical techniques) at each tested time period, and then detecting at which time periods of serum deprivation the virally infected cells were eliminated. It is preferable that shorter time periods of serum deprivation that still provide elimination of the persistently infected cells be used. Furthermore, the cycle of starvation, then adding back serum and determining amount of virus remaining in the culture can be repeated until no virtually infected cells remain in the culture.

[0072] Thus, the present method can further comprise passaging the cells, i.e., transferring the cell culture from a first container to a second container. Such transfer can facilitate the selective lack of survival of virally infected cells. Transfer can be repeated several times. Transfer is achieved by standard methods of tissue culture (see, e.g., Freshney, Culture of Animal Cells, A Manual of Basic Technique, 2nd Ed. Alan R. Liss, Inc., New York, 1987).

[0073] The present method further provides a method of selectively eliminating from a cell culture cells persistently infected with a virus, comprising propagating the cell culture in the absence of a functional form of the serum protein having a molecular weight of between about 50 kD and 100 kD which resists inactivation in low pH and resists inactivation by chloroform extraction, which inactivates when boiled and inactivates in low ionic strength solution, and which when removed from a cell culture comprising cells persistently infected with reovirus substantially prevents survival of cells persistently infected with reovirus. The absence of the functional form can be achieved by any of several standard means, such as by binding the protein to an antibody selective for it (binding the antibody in serum either before or after the serum is added to the cells; if before, the serum protein can be removed from the serum by, e.g., binding the antibody to a column and passing the serum over the column and then administering the survival protein-free serum to the cells), by administering a compound that inactivates the protein, or by administering a compound that interferes with the interaction between the virus and the protein.

[0074] Thus, the present invention provides a method of selectively eliminating from a cell culture propagated in serum-containing medium cells persistently infected with a virus, comprising inhibiting in the serum the protein having a molecular weight of between about 50 kD and 100 d) which resists inactivation in low pH and resists inactivation by chloroform extraction, which inactivates when boiled and inactivates in low ionic strength solution, and which when removed from a cell culture comprising cells persistently infected with reovirus substantially prevents survival of cells persistently infected with reovirus. Alternatively, the interaction between the virus and the serum protein can be disrupted to selectively eliminate cells persistently infected with the virus.

[0075] Any virus capable of some form of persistent infection may be eliminated from a cell culture utilizing the present elimination methods, including removing, inhibiting or otherwise interfering with a serum protein, such as the one exemplified herein, and also including removing, inhibiting or otherwise interfering with a gene product from any cellular gene found by the present method to be necessary for viral growth yet nonessential to the cell. For example, DNA viruses or RNA viruses can be targeted. One can readily determine whether cells infected with a selected virus can be selectively removed from a culture through removal of serum by starving cells permissive to the virus of serum (or inhibiting the serum survival factor), adding the selected virus to the cells, adding serum to the culture, and observing whether infected cells die (i.e., by titering levels of virus in the surviving cells with an antibody specific for the virus).

[0076] A culture of any animal cell (i.e., any cell that is typically grown and maintained in culture in serum) that can be maintained for a period of time in the absence of serum, can be purified from viral infection utilizing the present method. For example, primary cultures as well as established cultures and cell lines can be used. Furthermore, cultures of cells from any animal and any tissue or cell type within that animal that can be cultured and that can be maintained for a period of time in the absence of serum can be used. For example, cultures of cells from tissues typically infected, and particularly persistently infected, by an infectious virus could be used.

[0077] As used in the claims “in the absence of serum” means at a level at which persistently virally infected cells do not survive. Typically, the threshold level is about 1% serum in the media. Therefore, about 1% serum or less can be used, such as about 1%, 0.75%, 0.50%. 0.25% 0.1% or no serum can be used.

[0078] As used herein, “selectively eliminating” cells persistently infected with a virus means that substantially all of the cells persistently infected with the virus are killed such that the presence of virally infected cells cannot be detected in the culture immediately after the elimination procedure has been performed. Furthermore, “selectively eliminating” includes that cells not infected with the virus are generally not killed by the method. Some surviving cells may still produce virus but at a lower level, and some may be defective in pathways that lead to death by the virus. Typically, for cells persistently infected with virus to be substantially all killed, more than about 90% of the cells, and more preferably less than about 95%, 98%, 99%, or 99.99% of virus-containing cells in the culture are killed.

[0079] The present method also provides a nucleic acid comprising the regulatory region of any of the genes. Such regulatory regions can be isolated from the genomic sequences isolated and sequenced as described above and identified by any characteristics observed that are characteristic for regulatory regions of the species and by their relation to the start codon for the coding region of the gene. The present invention also provides a construct comprising the regulatory region functionally linked to a reporter gene. Such constructs are made by routine subcloning methods, and many vectors are available into which regulatory regions can be subcloned upstream of a marker gene. Marker genes can be chosen for ease of detection of marker gene product.

[0080] The present method therefore also provides a method of screening a compound for treating a viral infection, comprising administering the compound to a cell containing any of the above-described constructs, comprising a regulatory region of one of the genes comprising the nucleotide sequence set forth in any of the sequences in SEQ ID LIST 1 functionally linked to a reporter gene, and detecting the level of the reporter gene product produced, a decrease or elimination of the reporter gene product indicating a compound for treating the viral infection. Compounds detected by this method would inhibit transcription of the gene from which the regulatory region was isolated, and thus, in treating a subject, would inhibit the production of the gene product produced by the gene, and thus treat the viral infection.

[0081] Some genes when disrupted by the present method of retrovirus insertion, resulted in overexpression of the gene product, and this overexpression inhibited viral replication. Specifically, as described in the Examples, by utilizing the methods of the present invention, the genomic locus comprising the sequence of CTCF was disrupted (clone designated 6BE72_rE (SEQ ID NO: 2) and this resulted in an overexpression of IGF2 which led to decreased viral replication. Therefore, the present invention provides a method of decreasing or inhibiting viral replication by overexpressing IGF2. The present invention also provides a method of increasing the expression of IGF2 by disrupting the CTCF gene, or by inhibiting the gene product of the CTCF gene. The human genomic sequence for IGF2 can be found on the publicly available GenBank Database under Accession No. NT_{—}033238. This sequence, available via GenBank Accession No. NT_{—}03328 is hereby incorporated by reference in its entirety by this reference. The human mRNA sequence for IGF2 can also be found on GenBank under Accession No. NM_{—}00612. This sequence, available via GenBank Accession No. NM_{—}00612 is hereby incorporated by reference in its entirety by this reference. The human mRNA sequence for CTCF can be found on GenBank under Accession No. NM_{—}080618. This sequence, available via GenBank Accession No. NM_{—}00612 is hereby incorporated by reference in its entirety by this reference. The human genomic sequence for CTCF, located on human chromosomal location 16q21-q22.3, can be found on GenBank under Accession No. NT_{—}10478. This sequence available via GenBank Accession No. NT_{—}010478 is hereby incorporated by reference in its entirety.

[0082] In another example, the methods of the present invention identified another clone (Lab Designation 14_{—}7#2 SEQ ID NO: 115)) which results in overexpression of N-acetylglucosaminyltransferase I which is encoded by Mgat-1. Overexpression of N-acetyglucosaminyltransfease I resulted in decreased viral replication.

[0083] Once a gene is found that upon disruption results in overexpression of another gene, the gene that is overexpressed can be modulated directly, i.e., via the overexpressed gene, or indirectly, i.e., via the gene that was originally disrupted (or its gene product) or via another gene (or its gene product) associated with the overexpressed gene. For example, one of skill in the art can administer a compound that results in the overexpression of IGF2. This compound may interact with the IGF2 gene, IGP2 mRNA or the IGF2 protein. The compound could also interact with the CTCF gene, CTCF mRNA or the CTCF protein to increase IGF2 expression. The compound can also interact with other genes, mRNAs or proteins involved in the IGF2 pathway, resulting in, increased IGF2 expression.

[0084] Thus, the present invention provides a method of screening a compound for effectiveness in treating a viral infection, comprising administering the compound to a cell containing a cellular gene functionally encoding a gene product whose overexpression inhibits reproduction of the virus, but does not prevent survival of the cell and detecting the level of the gene product produced, an increase in the gene product indicating a compound effective for treating a viral infection. Typically, an increase will be 10%, 20%, 30%, 40%, 50%, 60%, 70%, 80%, 90%, 100%, 125%, 150%, 175%, 200%, 300%, 400%, 500% or higher increase over gene product produced when the compound is not present.

[0085] The present invention additionally provides a method of reducing or inhibiting a viral infection in a subject, comprising administering to the subject an amount of a composition that inhibits expression or functioning of a gene product encoded by a gene comprising the nucleic acid set forth in any of the sequences in the Sequence Listing or a homolog thereof, or a gene identified in Table 1 or 2, or otherwise, in this application, thereby treating the viral infection. The composition can comprise, for example, an antibody that binds a protein encoded by the gene. The composition can also comprise an antibody that binds a receptor for a protein encoded by the gene. Such an antibody can be raised against the selected protein by standard methods, and can be either polyclonal or monoclonal, though monoclonal is preferred. Alternatively, the composition can comprise an antisense RNA that binds an RNA encoded by the gene. Furthermore, the composition can comprise a nucleic acid functionally encoding an antisense RNA that binds an RNA encoded by the gene. Other useful compositions will be readily apparent to the skilled artisan.

[0086] The present invention also provides a method of treating a viral infection in a subject comprising administering to the subject a treatment effective amount of a composition that increases expression of a gene whose overexpession reduces or inhibits viral replication. Typically, an increase in expression will be a 10%, 20%, 30%, 40%, 50%, 60%, 70%, 80%, 90%, 100%, 125%, 150%, 175%, 200%, 300%, 400%, 500% or higher increase over gene product produced when the composition is not present.

[0087] The present invention further provides a method of reducing or inhibiting a viral infection in a subject comprising mutating ex vivo in a selected cell from the subject an endogenous gene comprising the nucleic acid set forth in any of the sequences listed in SEQ ID LIST 1, or a homolog thereof, to a gene form incapable of producing a functional gene product of the gene or a gene form producing a reduced amount of a functional gene product of the gene, and replacing the cell in the subject, thereby reducing viral infection of cells in the subject. The cell can be selected according to the typical target cell of the specific virus whose infection is to be reduced, prevented or inhibited. A preferred cell for several viruses is a hematopoietic cell. When the selected cell is a hematopoietic cell, viruses which can be reduced or inhibited from infection can include, for example, HIV, including HIV-1 and HIV-2.

[0088] The invention also includes a method of reducing or inhibiting viral infection in a subject comprising mutating ex vivo in a selected cell, for example from a subject or an allogenic source, an endogenous gene comprising a nucleic acid set forth in SEQ ID LIST 1 whose overexpression causes inhibition of viral replication, or a homolog thereof, to a gene form that expresses the gene at a higher level than the endogenous gene, and placing or replacing the cell in the subject. Typically, a higher level can be 10%, 20%, 30%, 40%, 50%, 60%, 70%, 80%, 90%, 100%, 125%, 150%, 175%, 200%, 300%, 400%, 500% or higher than the non-mutated, endogenous gene. The cell can be selected according to the typical target cell of the specific virus whose infection is to be reduced, prevented or inhibited. A preferred cell for several viruses is a hematopoietic cell. When the selected cell is a hematopoietic cell, viruses which can be reduced or inhibited from infection can include, for example, HIV, including HIV-1 and HIV-2. However, many other virus-cell combinations will be apparent to the skilled artisan.

[0089] The present invention additionally provides a method of increasing viral infection resistance in a subject comprising mutating ex vivo in a selected cell, for example from the subject or from an allogenic source, an endogenous gene comprising a nucleic acid set forth in SEQ LIST 1, whose inhibition or reduction in expression increases viral infection resistance, said endogenous gene being mutated to a mutated gene form incapable of producing a functional gene product of the gene or a gene form producing a reduced amount of a functional gene product of the gene, and placing the cell in the subject, thereby increasing viral infection resistance of cells in the subject. The virus can be HIV, particularly when the cell is a hematopoietic cell. However, many other virus-cell combinations will be apparent to the skilled artisan.

[0090] The present invention also provides a method of reducing or inhibiting a viral infection in a subject comprising mutating ex vivo in a selected cell from the subject an endogenous gene comprising a nucleic acid isolated by a method comprising (a) transferring into a cell culture growing in serum-containing medium a vector encoding a selective marker gene lacking a functional promoter, (b) selecting cells expressing the marker gene, (c) removing serum from the culture medium, (d) infecting the cell culture with the virus, and (e) isolating from the surviving cells a cellular gene within which the marker gene is inserted, to a mutated gene form incapable of producing a functional gene product of the gene or to a mutated gene form producing a reduced amount of a functional gene product of the gene, and replacing the cell in the subject, thereby reducing viral infection of cells in the subject. Thus the mutated gene form can be one incapable of producing an effective amount of a functional protein or mRNA, or one incapable of producing a functional protein or mRNA, for example. The method can be performed wherein the virus is HIV. The method can be performed in any selected cell in which the virus may infect with deleterious results. For example, the cell can be a hematopoietic cell. However, many other virus-cell combinations will be apparent to the skilled artisan.

[0091] The present invention additionally provides a method of increasing viral infection resistance in a subject comprising mutating ex vivo in a selected cell from the subject an endogenous gene comprising a nucleic acid isolated by a method comprising

(a) transferring into a cell culture growing in serum-containing medium a vector encoding a selective marker gene lacking a functional promoter, (b) selecting cells expressing the marker gene, (c) removing serum from the culture medium, (d) infecting the cell culture with the virus, and (e) isolating from the surviving cells a cellular gene within which the marker gene is inserted, to a mutated gene form incapable of producing a functional gene product of the gene or a gene form producing a reduced amount of a functional gene product of the gene, and replacing the cell in the subject, thereby reducing viral infection of cells in the subject. The virus can be HIV, particularly when the cell is a hematopoietic cell. However, many other virus-cell combinations will be apparent to the skilled artisan.

[0092] The present invention also provides a method of reducing or inhibiting a viral infection in a subject comprising mutating ex vivo in a selected cell from the subject an endogenous gene comprising a nucleic acid isolated by a method comprising (a) transferring into a cell culture growing in serum-containing medium a vector encoding a selective marker gene lacking a functional promoter, (b) selecting cells expressing the marker gene, (c) infecting the cell culture with the virus, and (d) isolating from the surviving cells a cellular gene within which the marker gene is inserted, to a mutated gene form incapable of producing a functional gene product of the gene or to a mutated gene form producing a reduced amount of a functional gene product of the gene, and replacing the cell in the subject, thereby reducing viral infection of cells in the subject. Thus the mutated gene form can be one incapable of producing an effective amount of a functional protein or mRNA, or one incapable of producing a functional protein or mRNA, for example. The method can be performed wherein the virus is HIV. The method can be performed in any selected cell in which the virus may infect with deleterious results. For example, the cell can be a hematopoietic cell. However, many other virus-cell combinations will be apparent to the skilled artisan.

[0093] The present invention additionally provides a method of increasing viral infection resistance in a subject comprising mutating ex vivo in a selected cell from the subject an endogenous gene comprising a nucleic acid isolated by a method comprising

(a) transferring into a cell culture growing in serum-containing medium a vector encoding a selective marker gene lacking a functional promoter, (b) selecting cells expressing the marker gene, (c) infecting the cell culture with the virus, and (d) isolating from the surviving cells a cellular gene within which the marker gene is inserted, to a mutated gene form incapable of producing a functional gene product of the gene or a gene form producing a reduced amount of a functional gene product of the gene, and replacing the cell in the subject, thereby reducing viral infection of cells in the subject. The virus can be HIV, particularly when the cell is a hematopoietic cell. However, many other virus-cell combinations will be apparent to the skilled artisan.

[0094] Furthermore, the present invention provides a method for isolation of cellular genes utilized in tumor progression. The present invention provides a method of identifying a cellular gene that can suppress a malignant phenotype in a cell, comprising (a) transferring into a cell culture incapable of growing well in soft agar or Matrigel a vector encoding a selective marker gene lacking a functional promoter, (b) selecting cells expressing the marker gene, and (c) isolating from selected cells which are capable of growing in soft agar or Matrigel a cellular gene within which the marker gene is inserted, thereby identifying a gene that can suppress a malignant phenotype in a cell. This method can be performed using any selected non-transformed cell line, of which many are known in the art.

[0095] The present invention additionally provides a method of identifying a cellular gene that can suppress a malignant phenotype in a cell, comprising (a) transferring into a cell culture of non-transformed cells a vector encoding a selective marker gene lacking a functional promoter, (b) selecting cells expressing the marker gene, and (c) isolating from selected and transformed cells a cellular gene within which the marker gene is inserted, thereby identifying a gene that can suppress a malignant phenotype in a cell. A non-transformed phenotype can be determined by any of several standard methods in the art, such as the exemplified inability to grow in soft agar, or inability to grow in Matrigel.

[0096] The present invention additionally provides a method of identifying a cellular gene that can suppress a malignant phenotype in a cell, comprising (a) transferring into a cell culture of non-transformed cells a vector encoding a selective marker gene lacking a functional promoter, (b) selecting cells expressing the marker gene, and (c) isolating from selected and transformed cells a cellular gene within which the marker gene is inserted, thereby identifying a gene that can suppress a malignant phenotype in a cell. A non-transformed phenotype can be determined by any of several standard methods in the art, such as the exemplified inability to grow in soft agar, or inability to grow in Matrigel. This method can be performed using any selected non-transformed cell line, of which many are known in the art.

[0097] The present invention further provides a method of screening for a compound for suppressing a malignant phenotype in a cell comprising administering the compound to a cell containing a cellular gene functionally encoding a gene product involved in establishment of a malignant phenotype in the cell and detecting the level of the gene product produced, a decrease or elimination of the gene product indicating a compound effective for suppressing the malignant phenotype. Detection of the level, or amount, of gene product produced can be measured, directly or indirectly, by any of several methods standard in the art (e.g., protein gel, antibody-based assay, detecting labeled RNA) for assaying protein levels or amounts, and selected based upon the specific gene product.

[0098] The present invention further provides a method of suppressing a malignant phenotype in a cell in a subject, comprising administering to the subject an amount of a composition that inhibits expression or functioning of a gene product encoded by a gene comprising the nucleic acid set forth in SEQ ID NO:76, SEQ ID NO:77, SEQ ID NO:78, SEQ ID NO:79, SEQ ID NO:80, SEQ ID NO:81, SEQ ID NO:82 or SEQ ID NO:83, SEQ ID NO: 92, SEQ ID NO: 109, SEQ ID NO: 110, SEQ ID NO: 111, SEQ ID NO: 112, SEQ ID NO: 119, SEQ ID NO: 177, SEQ ID NO: 206, SEQ ID NO: 240, SEQ ID NO: 243, SEQ ID NO: 247, SEQ ID NO: 321, SEQ ID NO: 328, SEQ ID NO: 329, SEQ ID NO: 330, SEQ ID NO: 331, SEQ ID NO: 334, SEQ ID NO: 335, SEQ ID NO: 336, SEQ ID NO: 408, SEQ ID NO: 411, SEQ ID NO: 412, SEQ ID NO: 413, SEQ ID NO: 414 or a homolog thereof, or any gene whose overexpression is found by the present method to be involved in suppressing a malignant phenotype in the cell (e.g., any clone designated herein with an “x” throughout the application) thereby suppressing a malignant phenotype. The composition can, for example, comprise an antibody that binds a protein encoded by the gene. The composition can, as another example, comprise an antibody that binds a receptor for a protein encoded by the gene. The composition can comprise an antisense RNA that binds an RNA encoded by the gene. Further, the composition can comprise a nucleic acid functionally encoding an antisense RNA that binds an RNA encoded by the gene.

[0099] The present invention further provides a method of suppressing a malignant phenotype in a cell in a subject, comprising administering to the subject an amount of a composition that increases expression of a gene product whose overexpression is involved in suppressing a malignant phenotype in the cell. The gene product can be the product of a gene wherein disruption of an upstream gene by the present vector resulted in overexpression of the downstream gene, and the overexpression of the downstream gene demonstrated a transformed phenotype. The composition can be, for example, an inhibitor, such as a small molecule inhibitor, of the COX 2 enzyme.

[0100] Diagnostic or therapeutic agents of the present invention can be administered to a subject or an animal model by any of many standard means for administering therapeutics or diagnostics to that selected site or standard for administering that type of functional entity. For example, an agent can be administered orally, parenterally (e.g., intravenously), by intramuscular injection, by intraperitoneal injection, topically, transdermally, or the like. Agents can be administered, e.g., as a complex with cationic liposomes, or encapsulated in anionic liposomes. Compositions can include various amounts of the selected agent in combination with a pharmaceutically acceptable carrier and, in addition, if desired, may include other medicinal agents, pharmaceutical agents, carriers, adjuvants, diluents, etc. Parental administration, if used, is generally characterized by injection. Injectables can be prepared in conventional forms, either as liquid solutions or suspensions, solid forms suitable for solution or suspension in liquid prior to injection, or as emulsions. Depending upon the mode of administration, the agent can be optimized to avoid degradation in the subject, such as by encapsulation, etc.

[0101] Dosages will depend upon the mode of administration, the disease or condition to be treated, and the individual subject's condition, but will be that dosage typical for and used in administration of antiviral or anticancer agents. Dosages will also depend upon the composition being administered, e.g., a protein or a nucleic acid. Such dosages are known in the art. Furthermore, the dosage can be adjusted according to the typical dosage for the specific disease or condition to be treated. Furthermore, viral titers in culture cells of the target cell type can be used to optimize the dosage for the target cells in vivo, and transformation from varying dosages achieved in culture cells of the same type as the target cell type can be monitored. Often a single dose can be sufficient; however, the dose can be repeated if desirable. The dosage should not be so large as to cause adverse side effects. Generally, the dosage will vary with the age, condition, sex and extent of the disease in the patient and can be determined by one of skill in the art. The dosage can also be adjusted by the individual physician in the event of any complication.

[0102] For administration to a cell in a subject, the composition, once in the subject, will of course adjust to the subject's body temperature. For ex vivo administration, the composition can be administered by any standard methods that would maintain viability of the cells, such as by adding it to culture medium (appropriate for the target cells) and adding this medium directly to the cells. As is known in the art, any medium used in this method can be aqueous and non-toxic so as not to render the cells non-viable. In addition, it can contain standard nutrients for maintaining viability of cells, if desired. For in vivo administration, the complex can be added to, for example, a blood sample or a tissue sample from the patient, or to a pharmaceutically acceptable carrier, e.g., saline and buffered saline, and administered by any of several means known in the art. Examples of administration include parenteral administration, e.g., by intravenous injection including regional perfusion through a blood vessel supplying the tissues(s) or organ(s) having the target cell(s), or by inhalation of an aerosol, subcutaneous or intramuscular injection, topical administration such as to skin wounds and lesions, direct transfection into, e.g., bone marrow cells prepared for transplantation and subsequent transplantation into the subject, and direct transfection into an organ that is subsequently transplanted into the subject. Further administration methods include oral administration, particularly when the composition is encapsulated, or rectal administration, particularly when the composition is in suppository form. A pharmaceutically acceptable carrier includes any material that is not biologically or otherwise undesirable, i.e., the material may be administered to an individual along with the selected complex without causing any undesirable biological effects or interacting in a deleterious manner with any of the other components of the pharmaceutical composition in which it is contained.

[0103] Specifically, if a particular cell type in vivo is to be targeted, for example, by regional perfusion of an organ or tumor, cells from the target tissue can be biopsied and optimal dosages for import of the complex into that tissue can be determined in vitro, as described herein and as known in the art, to optimize the in vivo dosage, including concentration and time length. Alternatively, culture cells of the same cell type can also be used to optimize the dosage for the target cells in vivo.

[0104] For either ex vivo or in vivo use, the complex can be administered at any effective concentration. An effective concentration is that amount that results in reduction, inhibition or prevention of the viral infection or in reduction or inhibition of transformed phenotype of the cells

[0105] A nucleic acid can be administered in any of several means, which can be selected according to the vector utilized, the organ or tissue, if any, to be targeted, and the characteristics of the subject. The nucleic acids, if desired in a pharmaceutically acceptable carrier such as physiological saline, can be administered systemically, such as intravenously, intraarterially, orally, parenterally, subcutaneously. The nucleic acids can also be administered by direct injection into an organ or by injection into the blood vessel supplying a target tissue. For an infection of cells of the lungs or trachea, it can be administered intratracheally. The nucleic acids can additionally be administered topically, transdermally, etc.

[0106] The nucleic acid or protein can be administered in a composition. For example, the composition can comprise other medicinal agents, pharmaceutical agents, carriers, adjuvants, diluents, etc. Furthermore, the composition can comprise, in addition to the vector, lipids such as liposomes, such as cationic liposomes (e.g., DOTMA, DOPE, DC-cholesterol) or anionic liposomes. Liposomes can further comprise proteins to facilitate targeting a particular cell, if desired. Administration of a composition comprising a vector and a cationic liposome can be administered to the blood afferent to a target organ or inhaled into the respiratory tract to target cells of the respiratory tract. Regarding liposomes, see, e.g., Brigham et al. Am. J. Resp. Cell. Mol. Biol. 1:95-100 (1989); Felgner et al. Proc. Natl. Acad. Sci. USA 84:7413-7417 (1987); U.S. Pat. No. 4,897,355.

[0107] For a viral vector comprising a nucleic acid, the composition can comprise a pharmaceutically acceptable carrier such as phosphate buffered saline or saline. The viral vector can be selected according to the target cell, as known in the art. For example, adenoviral vectors, in particular replication-deficient adenoviral vectors, can be utilized to target any of a number of cells, because of its broad host range. Many other viral vectors are available, and their target cells known.

### EXAMPLES

### Selective Elimination of Virally Infected Cells from a Cell Culture

[0108] Rat intestinal cell line-1 cells (RIE-1 cells) were standardly grown in Dulbecco's modified eagle's medium, high glucose, supplemented with 10% fetal bovine serum. To begin the experiment, cells persistently infected with reovirus were grown to near confluence, then serum was removed from the growth medium by removing the medium, washing the cells in PBS, and returning to the flask medium not supplemented with serum. Typically, the serum content was reduced to 1% or less. The cells are starved for serum for several days, or as long as about a month, to bring them to quiescence or growth arrest. Media containing 10% serum is then added to the quiescent cells to stimulate growth of the cells. Surviving cells are found to not to be persistently infected cells by immunohistochemical techniques used to establish whether cells contain any infectious virus,(sensitivity to 1 infectious virus per ml of homogenized cells).

### Cellular Genomic DNA Isolation

[0109] Gene Trap Libraries: The libraries are generated by infecting the RIE-1 cells with a retrovirus vector (U3 gene-trap) at a ratio of less than one retrovirus for every ten cells. When a U3 gene trap retrovirus integrates within an actively transcribed gene, the neomycin resistance gene that the U3 gene trap retrovirus encodes is also transcribed, this confers resistance to the cell to the antibiotic neomycin. Cells with gene trap events are able to survive exposure to neomycin while cells without a gene trap event die. The various cells that survive neomycin selection are then propagated as a library of gene trap events. Such libraries can be generated with any retrovirus vector that has the properties of expressing a reporter gene from a transcriptionally active cellular promoter that tags the gene for later identification.

[0110] Reovirus selection: Reovirus infection is typically lethal to RIE-1 cells but can result in the development of persistently infected cells. These cells continue to grow while producing infective reovirus particles. For the identification of gene trap events that confer reovirus resistance to cells, the persistently infected cells must be eliminated or they will be scored as false positives. We have found that RIE-1 cells persistently infected with reovirus are very poorly tolerant to serum starvation, passaging and plating at low density. Thus, we have developed protocols for the screening of the RIE-1 gene trap libraries that select against both reovirus sensitive cells and cells that are persistently infected with reovirus.
[0111] 1. RIE-1 library cells are grown to near confluence and then the serum is removed from the media. The cells are starved for serum for several days to bring them to quiescent or growth arrest.
[0112] 2. The library cells are infected with reovirus at a titer of greater than ten reovirus per cell and the serum starvation is continued for several more days.
[0113] 3. The infected cells are passaged, (a process in which they are exposed to serum for three to six hours) and then starved for serum for several more days.
[0114] 4. The surviving cells are then allowed to grow in the presence of serum until visible colonies develop at which point they are cloned by limiting dilution.
   MEDIA: DULBECCO'S MODIFIED EAGLE'S MEDIUM, HIGH GLUCOSE (DME/HIGH) Hyclone Laboratories cat. no. SH30003.02.
   NEOMYCIN: The antibiotic used to select against the cells that did not have a U3 gene trap retrovirus. We used GENETICIN, from Sigma. cat. no. G9516.
   RAT INTESTINAL CELL LINE-1 CELLS (RIE-1 CELLS): These cells are from the laboratory of Dr. Ray Dubois (VAMC). They are typically cultured in Dulbecco's Modified Eagle's Medium supplemented with 10% fetal calf serum. REOVIRUS: Laboratory strains of either serotype 1 or serotype 3 are used. They were originally obtained from the laboratories of Bernard N. Fields (deceased). These viruses have been described in detail.
   RETROVIRUS: The U3 gene trap retrovirus used here were developed by Dr. Earl Ruley (VAMC) and the libraries were produced using a general protocol suggested by him.
   SERUM: FETAL BOVINE SERUM Hyclone Laboratories cat. no. A-1115-L.

### Genes Necessary for Viral Infection

[0115] Characteristics of some of the isolated sequences include the following:
SEQ ID NO:1—rat genomic sequence of vacuolar H+ ATPase (chemically inhibiting the activity of the gene product results in resistance to influenza virus and reovirus)
SEQ ID NO:2—rat alpha tropomyosin genomic sequence
SEQ ID NO:3—rat genomic sequence of murine and rat gas5 gene (cell cycle regulated gene)
SEQ ID NO:4—rat genomic sequence of p162 of ras complex, mouse, human (cell cycle regulated gene)
SEQ ID NO:5—similar to N-acetyl-glucosaminyltransferase I mRNA, mouse, human (enzyme located in the Golgi region in the cell; has been found as part of a DNA containing virus)
SEQ ID NO:6—similar to calcyclin, mouse, human, reverse complement (cell cycle regulated gene)
SEQ ID NO:7—contains sequence similar to: LOCUS AA254809 364 bp mRNA EST DEFINITION mz75a10.r1 Soares mouse lymph node NbMLN Mus musculus cDNA clone 719226 5′
SEQ ID NO:8—contains a sequence similar to No SW:RSP1_MOUSE Q01730 RSP-1 PROTEIN
SEQ ID NO:9—contains 5′ UTR of gb|U25435|HSU25435 Human transcriptional repressor (CTCF) mRNA, complete cds, Length=3780
SEQ ID NO:38—similar to cDNA of retroviral origin
SEQ ID NO: 50—trapped AYU-6 genetic element
Isolation of Cellular Genes that Suppress a Malignant Phenotype

[0116] We have utilized a gene-trap method of selecting cell lines that have a transformed phenotype (are potentially tumor cells) from a population of cells (RIE-1 parentals) that are not transformed. The parental cell line, RIE-1 cells, does not have the capacity to grow in soft agar or to produce tumors in mice. Following gene-trapping, cells were screened for their capacity to grow in soft agar. These cells were cloned and genomic sequences were obtained 5′ or 3′ of the retrovirus vector SEQ ID NO:76, SEQ ID NO:77, SEQ ID NO:78, SEQ ID NO:79, SEQ ID NO:80, SEQ ID NO:81, SEQ ID NO:82, SEQ ID NO:83, SEQ ID NO: 92, SEQ ID NO: 109, SEQ ID NO: 110, SEQ ID NO: 111, SEQ ID NO: 112, SEQ ID NO: 119, SEQ ID NO: 177, SEQ ID NO: 206, SEQ ID NO: 240, SEQ ID NO: 243, SEQ ID NO: 247, SEQ ID NO: 321, SEQ ID NO: 328, SEQ ID NO: 329, SEQ ID NO: 330, SEQ ID NO: 331, SEQ ID NO: 334, SEQ ID NO: 335, SEQ ID NO: 336, SEQ ID NO: 408, SEQ ID NO: 411, SEQ ID NO: 412, SEQ ID NO: 413, SEQ ID NO: 414. All of the clones designated with an “x” in the lab designations set forth throughout this application represent genes involved in tumor progression. All of the cell lines behave as if they are tumor cell lines, as they also induce tumors in mice.

[0117] Of the cell lines, two are associated with the enhanced expression of the prostaglandin synthetase gene II or COX 2. It has been shown that-disruption of gene function by retroviral targeting of an upstream gene has lead to increased expression of a downstream gene product, COX 2. When a small molecule inhibitor of COX 2 enzyme was added, reversion of the transformed phenotype occurred. The COX 2 gene has been found to be increased in pre-malignant adenomas in humans and overexpressed in human colon cancer. Inhibitors of COX 2 expression also arrests the growth of the tumor. One of the cell lines, x18 (SEQ ID NO:177) has disrupted a gene that is represented in the EST (dbest) database.

(SEQ ID NO:76): >02-X18H-t7 . . . , identical to: gb|W55397|W55397 mb13h04.r1 Life Tech mouse brain Mus at 1.0e-114. x18 has also been sequenced from the vector with the same EST being found. (SEQ ID NO:77): >x8_b4_{—}2 . . . (SEQ ID NO:78): >x7_b4. (SEQ ID NO:79): >x4-b4. (SEQ ID NO:80): >x2-b4 . . . (SEQ ID NO:81): >x15-b4. (SEQ ID NO:82): >x13-re . . . , reverse complement. (SEQ ID NO:83): >x12_b4.

[0118] Each of the genes from which the provided nucleotide sequences is isolated represents a tumor suppressor gene. The mechanism by which the disrupted genes other than the gene comprising the nucleic acid which sequence is set forth in SEQ ID NO:76 may suppress a transformed phenotype is at present unknown. However, each one represents a tumor suppressor gene that is potentially unique, as none of the genomic sequences correspond to a known gene. The capacity to select quickly tumor suppressor genes may provide unique targets in the process of treating or preventing (potential for diagnostic testing) cancer.

### Isolation of Entire Genomic Genes

[0119] An isolated nucleic acid of this invention (whose sequence is set forth in any of SEQ ID NO:1 through SEQ ID NO: 418), or a smaller fragment thereof, is labeled by a detectable label and utilized as a probe to screen a rat genomic library (lambda phage or yeast artificial chromosome vector library) under high stringency conditions, i.e., high salt and high temperatures to create hybridization and wash temperature 5-20° C. Clones are isolated and sequenced by standard Sanger dideoxynucleotide sequencing methods. Once the entire sequence of the new clone is determined, it is aligned with the probe sequence and its orientation relative to the probe sequence determined. A second and third probe is designed using sequences from either end of the combined genomic sequence, respectively. These probes are used to screen the library, isolate new clones, which are sequenced. These sequences are aligned with the previously obtained sequences and new probes designed corresponding to sequences at either end and the entire process repeated until the entire gene is isolated and mapped. When one end of the sequence cannot isolate any new clone, a new library can be screened. The complete sequence includes regulatory regions at the 5′ end and a polyadenylation signal at the 3′ end.

Isolation of cDNAs

[0120] An isolated nucleic acid (whose sequence is set forth in any of SEQ ID NO:1 through SEQ ID NO:418, or a smaller fragment thereof, or additional fragments obtained from the genomic library, that contain open reading frames, is labeled by a detectable label and utilized as a probe to screen a portions of the present fragments, to screen a cDNA library. A rat cDNA library obtains rat cDNA; a human cDNA library obtains a human cDNA. Repeated screens can be utilized as described above to obtain the complete coding sequence of the gene from several clones if necessary. The isolates can then be sequenced to determine the nucleotide sequence by standard means such as dideoxynucleotide sequencing methods.

### Serum Survival Factor Isolation and Characterization

[0121] The lack of tolerance to serum starvation is due to the acquired dependence of the persistently infected cells for a serum factor (survival factor) that is present in serum. The serum survival factor for persistently infected cells has a molecular weight between 50 and 100 kD and resists inactivation in low pH (pH2) and chloroform extraction. It is inactivated by boiling for 5 minutes [once fractionated from whole serum (50 to 100 kD fraction)], and in low ionic strength solution [10 to 50 mM].

[0122] The factor was isolated from serum by size fraction using centriprep molecular cut-off filters with excluding sizes of 30 and 100 kd (Millipore and Amnicon), and dialysis tubing with a molecular exclusion of 50 kd. Polyacrylamide gel electrophoresis and silver staining was used to determine that all of the resulting material was between 50 and 100 kd, confirming the validity of the initial isolation. Further purification was performed on using ion exchange chromatography, and heparin sulfate adsorption columns, followed by HPLC. Activity was determined following adjusting the pH of the serum fraction (30 to 100 kd fraction) to different pH conditions using HCl and readjusting the pH to pH 7.4 prior to assessment of biologic activity. Low ionic strength sensitivity was determined by dialyzing the fraction containing activity into low ionic strength solution for various lengths of time and readjusting ionic strength to physiologic conditions prior to determining biologic activity by dialyzing the fraction against the media. The biologic activity was maintained in the aqueous solution following chloroform extraction, indicating the factor is not a lipid. The biologic activity was lost after the 30 to 100 kd fraction was placed in a 100° C. water bath for 5 minutes.

### Isolated Nucleic Acid

[0123] Tagged genomic DIAS isolated were sequenced by standard methods using Sanger dideoxynucleotide sequencing. The nucleotide sequences of these nucleic acids are set forth herein as SEQ ID NO: 1 to 428 (SEQ ID List 1). The sequences were run through computer databanks in a homology search. Sequences for some of the “6b” sequences [obtained from genomic library 6, flask b] (i.e., SEQ ID NO:37, 38, 39, 42, 61, 65, 66, 69) correspond to a known gene, alpha tropomyosin, and some of the others correspond to the vacuolar-H⁺-ATPase. These sequences are associated with both acute and persistent viral infection and the cellular genes which comprise them, i.e., alpha tropomyosin and vacuolar-H⁺-ATPase, can be targets for drug treatments for viral infection using the methods described above. These genes can be therapy targets particularly because disruption of one or both alleles results in a viable cell.

### Identification Tags for Isolated Nucleic Acids

[0124] Genomic sequences, tagged with a vector, such as the U3 gene trap vector, are given a number corresponding to the genomic library of mutant cells from which the sequence was isolated, and a letter indicating a unique member of the library. More than one sequence with the same number and letter indicates multiple, unique sequences obtained from the genome surrounding the vector insert that “tagged” the gene. Such genomic sequences are obtained using vector-based primers, from which sequencing occurs 3′ to 5′ or 5′ to 3′. In the former case, to recover the orientation of the gene into which the vector inserted, the sequence derived from the vector primer must be reversed and complemented. Such reverse complement sequences are designated “rE”. In the case of genome sequencing from a primer that occurs 5′ to 3′ (i.e. the primer is at the 3′ end of the vector), no changes are needed, since the derived sequence is the sequence as it appears in the gene disrupted. Such sequences are designated “B4”. Homologies indicated below each genomic sequence are in the positive direction, unless explicitly noted to be on the negative strand. As an example, SEQ ID NO. 110 comprises a nucleic acid sequence encoding a novel polypeptide on the positive strand, while the negative strand encodes ferritin.

[0125] The SEQ ID NOs and the lab designations for additional genes identified using the methods of the present invention appear below.

| | |
|---|---|
| 84 | 32-3-2#1E/-rE |
| 85 | L191B2E#1-RE |
| 86 | L191B2E#3+-rE |
| 87 | 21-5-9E-RE |

homology to: emb/AL021154/HS15005 human DNA sequence

| | |
|---|---|
| 88 | 14A14E-rE |
| 89 | 4cx-b4 |
| 90 | 5a-b4 |
| 91 | 6BSA12-B4 |
| 92 | X7B/B4 |
| 93 | x27b4f_1 |
| 94 | 12C#A-rE |
| 95 | 10-3b(5/2/96)/-rE |
| 96 | 10_4B_4-rE |
| 97 | 6BE60-rE |

homology to: alpha-trophomyosin

| | |
|---|---|
| 98 | 19D3E-rE |
| 99 | L19D16E-rE |
| 100 | 2b_rE |
| 101 | 14_24_#6-rE |
| 102 | 7A7′-rE |

homology to: annexin II/dynein I

| | |
|---|---|
| 103 | L12cx#6-rE |

homology to: gb:X51760 human zinc finger protein ZFP-36

| | |
|---|---|
| 104 | L12cx#11-rE |
| 105 | 19D5E-rE |

homology to: 6-pyruvoyl-tetrahydropterin synthase (gb/M77850/RAT6PTHS)

| | |
|---|---|
| 106 | 12_3b#7-rE |
| 107 | 12_3B#8-RE |

homology to: gb/AA871174/vq32a08.r1 Barskad bowel MPLRBg Mus musculus cDNA
clone 10959265′

| | |
|---|---|
| 108 | 9B27-2-E |

homology to: RAT LOCUS RNU53922 04 May 1996; Rattus norvegicus DnaJ-like protein (RDJ1) mRNA, complete Cds, ACCESSION U53922 (on negative strand)

| | |
|---|---|
| 109 | x15-rE |
| 110 | X11-rE |

homology to: ferritin H (on the negative strand)

| | |
|---|---|
| 111 | X20-rE |

homology to: LOCUS RATGL5A Rat NICER element (GL5-14)₅′ long terminal repeat, Acc. No. M59028 M33535N1D

| | |
|---|---|
| 112 | X4-rE |
| 113 | 14A7E-rE |

homology to: MMSMAD7 3681 by mRNA ROD 31 Jul. 1998 DEFINITION Mus musculus mRNA for Mad-related protein Smad7 ,149 bases

| | |
|---|---|
| 114 | 14A13E-rE |
| 115 | 14_7#2E-rE |

homology to: N-acetylglucosaminyltransferase I

| | |
|---|---|
| 116 | 12CX#6-rE |

homology to: gb|AA522204|AA522204 vf98g09_rl Soares mouse mammary gland NbMMG Mus musculus cDNA clone 851872; also 5′ similar to gb X51760 zinc finger protein ZFP-36 (HUMAN), gb L20450 Mus musculus DNA-binding protein mRNA, complete cds (MOUSE); Length=442, 925 bases (shares homology with SEQ ID NO:20)

| | |
|---|---|
| 117 | 12C_2B#9E-rE |
| 118 | 12CX#11E-rE |
| 119 | x5-rE |
| 120 | 8C5_11-rE |
| 121 | 191E2E-rE |
| 122 | 19_7AE-rE |
| 123 | 19_9BE-rE |

homology to: LOCUS HS347M6 56583 by DNA PRI 14 Jan. 1998 Human DNA sequence from PAC 347M6 on chromosome Xq22, CSTF2 (Cleavage Stimulation Factor, CF-1, Polyadenylation Factor) 64 kD subunit gene

| | |
|---|---|
| 124 | 191E9E-rE |
| 125 | 191E8E-rE |
| 126 | 14C_2E/-rE |

homology to: gb/H31084/EST104778 Rattus sp. cDNA -5′ end similar to signal recognition particle subunit(19 kDa) (on negative strand)

| | |
|---|---|
| 127 | 14H1E-rE |
| 128 | 14G3E-rE |
| 129 | 14G_2E-rE |
| 130 | 6_3_6_2E/-rE |

homology to: Rattus norvegicus cis-golgi gp130 (on negative strand); and a HUMAN EST (on positive strand) AI127398; qb70g11.x1 Soares fetal heart NbHH19W Homo sapiens cDNA clone (1705508 3′ mRNA sequence)

| | |
|---|---|
| 131 | 14H4E/-rE |
| 132 | 18A_8_4E-rE |
| 133 | 18A_8_1E-rE |
| 134 | SCB2_19E-rE |
| 135 | L197B3E-rE |
| 136 | L195C5E-rE |

homology to: H. pylori and C. jeuni

| | |
|---|---|
| 137 | 21_5_7E-rE |

homology to: id3 gene; emb|AL021154|HS150O5 Human DNA sequence from clone 150O5; HTGS phase 1 [Homo sapiens]; containing the E2F2 gene for transcription factor E2F-2 and the ID3 gene for Inhibitor of DNA binding 3 (dominant negative helix-loop-helix protein), 1R2, Length=133667, 971 bases

| | |
|---|---|
| 138 | L195B1E-rE |

homology to: vK72b07.s1 Knowles Solter mouse 2 cell Mus musculus cDNA clone 960181 5′

| | |
|---|---|
| 139 | L194c4E-rE |
| 140 | L193A1E#A-rE |
| 141 | L192A3E-rE |
| 142 | L1739E-rE |
| 143 | L192B3E#13-rE |

contains sequence identical to: insulin growth factorII/mannose-6-phosphate receptor

| | |
|---|---|
| 144 | 3 2 4 rE |

located in the same region of the genome as calcyclin, but the gene is “read” in the opposite direction

| | |
|---|---|
| 145 | 36 7 1 a-rE |
| 146 | 36 5 1 4 a-rE |
| 147 | 34 25 5a-rE |

rat satellite DNA (RATRSSID 93 bp, ROD 12-MAR-1984)

| | |
|---|---|
| 148 | 34 24-126/rE |

homology to:
HSU49928 (3096 by mRNA) PRI 06-APR-1998, Homo sapiens TAK1 binding protein (TAB1) mRNA, complete cds, ACCESSION U49928 NID g1401125, and HS333H23 (142274 by DNA) HTG 17 Jul. 1998 Human DNA sequence

| | |
|---|---|
| 149 | 34 23-1/rE |
| 150 | 36 5 2-6/rE |
| 151 | 36 5 2-196/rE |
| 152 | 34 23-3/rE |

homology to: gb|L16546|RATAP1X Rat P-glycoprotein (mdr1b) gene

| | |
|---|---|
| 153 | 34 25 23-rE |
| 154 | 36 5 2-196/rE |
| 155 | 31 3 9/rE |

homology to: AA798638 568 bp mRNA EST 10 Feb. 1998, vw34b06.r1 Soares mouse mammary gland NbMMG Mus musculus cDNA clone 1245683 5, mRNA sequence, 824 bases.

| | |
|---|---|
| 156 | 31 3 6-2-rE |
| 157 | 31 3 17-rE |
| 158 | 31 3 5-rE |

homology to: AF046001 2347 bp mRNA PRI 19 Feb. 1998, Homo sapiens zinc finger transcription factor (ZNF207) mRNA, complete Cds, 833 bases.

| | |
|---|---|
| 159 | 31 3 15#1/rE |
| 160 | 24 3 5#1/rE |
| 161 | 31 4 4#1/rE |
| 162 | 31 3 19#2/rE |
| 163 | 31 4 5#1/rE |
| 164 | 24 9 3#2/rE |
| 165 | L24_26_1-BL |

homology to: AI045472 396 bp mRNA EST 6 Jul. 1998, UI-R—C1-jz-h-09-0-UI.s2 UI-R-C1 Rattus norvegicus cDNA cloneUI-R—C1-jz-h-09-0-UI 3′, mRNA sequence.

| | |
|---|---|
| 166 | L24_26_1-B4 |
| 167 | L22_5A1/rE |
| 168 | L24_3_2B/rE |
| 169 | L24 4-2/rE |
| 170 | L24 5-2/rE |
| 171 | L24 5-3/rE |
| 172 | (15-)L28AP/rE |
| 173 | L24 26-10/rE |

homology to: LOCUS R06687 403 bp mRNA EST 03-APR-1995; yf10a10.r1 Soares fetal liver spleen 1NFLS Homo sapiens cDNA clone 126426 5′

| | |
|---|---|
| 174 | L24 26-2A/rE |
| 175 | L24 26-2B/rE |

homology to: gb|AA590026|AA590026 vm22g03.r1 Knowles Solter mouse blastocyst B1 Mus musculus cDNA clone 990964 , 459 bases, 139A; and Rattus norvegicus Eker rat-associated intracisternal-A particle element

| | |
|---|---|
| 176 | 14 7#2E-rE |

homology to: N-acetylglucosaminyltransferase I; this sequence shares homology with SEQ ID NO:32.

| | |
|---|---|
| 177 | x18 |
| 178 | 31_3_9-rE |
| 179 | 31_3_6_2-rE |
| 180 | 31_3_17-rE |
| 181 | 31_3_15#1-rE |
| 182 | 24_3_5#1-rE |
| 183 | 31_4_4#1-rE |
| 184 | 31_3_19#2-rE |
| 185 | 31_4_5#1-rE |
| 186 | 24_9_3#2-rE |
| 187 | 14XD#12E-rE |
| 188 | 70A-rE |
| 189 | 31-3-4-rE |
| 190 | 3_6_9-NeoG-rE |
| 191 | 31_4_2-rE |
| 192 | 3_2_13-rE |

homology to: calcyclin

| | |
|---|---|
| 193 | 3_2_4-E |
| 194 | L25-10/-rE |

homology to: calcyclin

| | |
|---|---|
| 195 | L24-4-3/-rE |
| 196 | L24-9-1-rE |

rat id sequence

| | |
|---|---|
| 197 | 17-L25-27#7-rE |

homology to: calcyclin

| | |
|---|---|
| 198 | L21C1E-rE |

homology to: calcychn

| | |
|---|---|
| 199 | L24-5-3BE-rE. |

homology to:
LOCUS H32572 310 bp mRNA EST 8 Sep. 1995 EST107805 Rat PC-12 cells, untreated Rattus sp cDNA 5′ end, ACCESSION H32572, and LOCUS AA858747 470 by mRNA EST 10 Mar. 1998 UI-R-A0-bb-e-01-0-UI.s1 UI-R-A0 Rattus norvegicus cDNA clone UI-R-A0-bb-e-01-0-UI, 3′ similar to gb|AA473081|AA473081 vd44b07-r1 Barstead MPLRB1 Mus musculus cDNA clone 803413 5′ mRNA sequence

| | |
|---|---|
| 200 | L24-4-2BE-rE |

homology to: LOCUS MMU51002 6495 bp DNA ROD 16 Jan. 1997 Mus musculus D1x-2 gene, complete cds, ACCESSION U51002 NID g1477589

| | |
|---|---|
| 201 | 17-3-3B-B4 |
| 202 | L24-26-3/-rE |

homology to: RNU23776, DNA ROD 10-AUG-1995, Rattus norvegicus Eker rat-associated intracisternal-A particle element

| | |
|---|---|
| 203 | 12_2B#2-rE |
| 204 | 05-17-3-3He-1-T7 |
| 205 | 21_5_8E-rE |

homology to: emb|AL021154|HS150O5 Human DNA sequence from clone 150O5; 1p36_{—}36_{—}22, contains the E2F2 gene for transcription factor E2F-2 and the ID3 gene for Inhibitor of DNA binding 3(dominant negative helix-loop-helix protein, 1R2, Length=133667, 971 bases

| | |
|---|---|
| 206 | X18H-t7 |
| 207 | 18A_8_4E-rE |
| 208 | L24-5-2BE-rE |
| 209 | L24-4-2AE-rE |
| 210 | L24-10-1BE-rE |

### Properties of Genes Necessary for Viral Infection

[0126] The methods of the present invention have identified imprinted genes such as IFG2r (Lab Designation L192b3E##13-rE (SEQ ID NO: 143)) and CTCF (paternally imprinted) which regulates IGF2 transcription (Lab Designation 6BE72_rE (SEQ ID NO: 2).

[0127] Also, of 120 clones selected for virus resistance, 6 genes (16 cell clones) were selected more than once from separate libraries. Calkylin was selected 10 times. In addition to calcyclin, other clones were disrupted more than once. The statistical difference between virus selected and random insertional events by test of proportions is p<5×10⁻⁵

[0128] Data also showed that HSV-1 reporter expression is enhanced in two cell clones. S100A6 (Lab Designation 3_{—}2_{—}13_rE (SEQ ID NO: 192)) and Annexin II (Lab Designation 7A7′-rE (SEQ ID NO: 102)) are the sequences disrupted in these clones. They are part of the same pathway and may bind to each other.

[0129] The present invention has also identified genes whose products are related by binding. For example Lab Designation 6B371H (SEQ ID NO: 65) has the anxI gene disrupted. Lab Designation 6B60 (SEQ ID NO: 237) has the TPM1 gene disrupted. Lab Designation 7A7′-rE (SEQ ID NO: 102)) has the anxII gene disrupted. Lab Designation 3_{—}2_{—}13 (SEQ ID NO: 192) has the S100A6 gene disrupted. Lab Designation 32_{—}3_{—}2#1E (SEQ ID NO: 84) has the cam2 gene disrupted. Lab Designation L24_{—}5_{—}3BE (SEQ ID NO: 199) has the TUSP gene disrupted. Lab Designation 31_{—}3_{—}15#1 (SEQ ID NO: 159) has the fkbp8 gene disrupted. Lab Designation 24_{—}9_{—}3#2 (SEQ ID NO: 164) has the cpr8 gene disrupted.

[0130] Data also showed that mutant cell clones can have an altered level of expression of the disrupted gene. For example, in the S100A6 clone (Lab Designation 3_{—}2_{—}13-rE (SEQ ID NO: 192)) S100A6 expression is decreased. For another clone, the P162 (eif3s10) (Lab Designation 12PSA#6_rE (SEQ ID NO: 4)) expression is increased. In yet another clone, TPM1 (Lab Designation 6b60_Lac (SEQ ID NO: 237)) expression has altered transcript size.

[0131] Overall, the genes disrupted by the methods of the present invention are varied and belong to several categories of protein families. This invention provides DNA binding proteins (znf207, HP1-BP74, HAT1); RNA Binding Proteins (zpf36, eif-3, CSTF); Metabolic enzymes (vacuolar H+ ATPase [16 and 31 kDa], GnT-1 [N-acetylglucosaminaltransferase); retrotransposons (intracisternal A element rat retroviral sequence); cell surface/matrix proteins (alpha-tropomyosin (TPM1)); signal transduction proteins (TAK1 and smad-7)); and molecular trafficking proteins (gm130, m6p/igf2r, annexin I, annexin II, annexin III, calcyclin, JWA, ERBIN, ABC-cassette [mdr1 ] and DnaJ.

### Example II

### Identification of Genes in IGF2 Pathway

[0132] To conduct a systematic screen for virus susceptibility genes, a gene entrapment approach, was developed to select intestinal epithelial cells (Blay & Brown (1985a); Blay & Brown (1985b)) resistant to reovirus-induced cell lysis. One of the selected reovirus-resistant clones overexpresses insulin growth factor-2 (IGF2) (Bell et al. (2000)) due to an inserted mutation in the CTCF transcriptional regulators. IGF2 overexpression was found to be sufficient for resistance to reovirus infection. In addition, the selected clone displayed a transformed cell phenotype by its ability to proliferate in soft agar₆. Thus, gain-of-function mutations in the IGF2 signaling pathway confer resistance to lytic viral infections and potentially contribute to carcinogenesis.

[0133] Libraries of RIE-1 cells created by random mutagenesis by a promoter-trap vector7 were used to select survivors following lytic reovirus infection. RIE-1 cells were mutagenized by using the U3NeoSV1 gene trap shuttle vector described herein and the resulting libraries of mutagenized cells were infected with reovirus serotype 1/Lang, MOI=35, to select for clones resistant to lytic infection. Persistently-infected (PI) cells (Ahmed (1977)) created following reovirus type 1 infection were found to require a serum survival factor Since PI cells provide a non-genetic mechanism by which RIE-1 cells can acquire resistance to lytic infections₉, reovirus-resistant clones were selected in serum free medium to remove PI survivors.

[0134] The isolated clones did not express reoviral antigens, and did not produce infectious virus as assessed by plaque assay, suggesting these reovirus resistant clones are not PI. Regions of 3 genomic DNA adjacent to the U3NeoSV1 provirus in each virus resistant clone were isolated by plasmid rescue and sequenced. Altogether, of the 130 isolated clones 62% of flanking sequences matched known or presumptive genes, and an additional 23% were represented in the public databases of expressed sequence tags (dbEST) or non-redundant sequences (nr). From the 90 clones matching known or presumptive genes, 8 genes are represented more than once. Many of the disrupted genes have known or imputed functions, and several are known to function in the same or related pathways. The library included 4 independent mutations of which three genes were associated with the insulin growth factor-2 (IGF2) signaling pathway, namely, the IGF2/mannose-6-phosphate receptor (IGF2/mpr)_{10,11}, the insulin growth factor binding protein (IGFBP) 5 protease (Trss11)₁₂, and the CTCF gene_{13,14} (clone 6b72). CTCF differentially represses maternal IGF2 gene expression, whereas the imprinted paternal gene escapes repression due to methylation of CTCF binding sites.

[0135] Levels of CTCF protein in 6b72 cells were reduced by about 50% as assessed by western blot analysis, consistent with the disruption of one allele. Diminished CTCF expression was associated with an increase in IGF2 transcripts as assessed by Northern blot. In addition, two products were amplified from 6b72 cells by RT-PCR using primers that flanked the IGF2 coding sequence. The first product was identical to the rat IGF2 sequence (Genbank Accession No. X17012), whereas, the second contained 14 additional nucleotides due to differential splicing of exon 2 to an alternative splice acceptor located upstream of exon 3. The alternative transcript encodes an abnormal protein consisting of the first 11 amino acids of the E-peptide appended to 60 amino acid residues without homology to any known protein. To examine whether increased expression of IGF2 in the 6b72 clone is associated with cellular resistance to reovirus infection, RIE-1 and 6b72 cells were infected with reovirus type 1, MOI=10. There was approximately a 90% decrease in titer of reovirus obtained from infection of the 6B72 clone compared to RIE-1 cells at 24 hours post-infection (4.5×10₅ versus 5.1×10₆) that was maintained at 48 hours. Additionally, there was a dramatic difference in the survival of 6b72 cells after being exposed to high titers of reovirus type 1. To determine whether IGF2 confers the property of resistance to lysis with reovirus, cell clones overexpressing the IGF2 gene and its splice variant were generated. Cells were examined for their capacity to resist lytic infection with reovirus. Over-expression of wild type, but not the splice variant IGF2 in RIE-1 cells increased the resistance of cells to reovirus infection by over 100 fold. However, when the splice variant IGF2 was transfected into 6b72 cells, the ability of 6b72 cells to survive infection was abolished. Over expression of the IGF2 gene in reverse orientation resulted in a slight difference in the capacity of 6b72 cells to resist infection. These studies suggest that increased IGF2 expression in 6b72 cells is associated with their capacity to resist lysis by reovirus infection, and that the splice variant IGF2 encodes a dominant negative isoform that blocks the effect of IGF2. There is accumulating evidence suggesting that overexpression of IGF2 associated with relaxation of IGF2 genomic imprinting is associated with tumor formation. To determine whether the 6b72 cells differ in their rate of cell cycling compared to wild type cells we examined the incorporation of MTS/PMS. It was found that there was no alteration in cell cycling (data not shown). RIE-1 cells do not have the capacity to proliferate in soft agar, a surrogate for the ability to form invasive tumors in rodents_{6.15}. It was found that 6B72 cells that have a disrupted CTCF gene develop the capacity to proliferate in soft agar To determine whether IGF2 confers this phenotype, cells that were transfected with the IGF2 wild type and its gene variant were examined. 6b72 cells that overexpress the IGF2 gene were found to grow in soft agar. Forced expression of either the splice variant IGF2 or an antisense IGF2 abrogrates the ability of 6b72 cells to grow in soft agar. Thus, the variant IGF2 appears to act as a trans-dominant inhibitor of IGF2 in this assay. Finally, as anticipated, there was no phenotype associated with overexpressing the splice variant IGF2 gene in the parental RIE-1 cells. The capacity to proliferate in soft agar is not a property of other reovirus-resistant clones that contain mutations in the IGF2 pathway Thus, cell clones with disrupted IGF2 receptor (IGF2/mpr) or IGF2BP 5 protease (prss11) genes did not proliferate in soft agar. Annexin II (anxa2) is involved in cytomegalovirus replication₁₆ and binds to the insulin and insulin growth factor-1 receptors₁₇. A clone with a disrupted anxa2 was found in our library, also failed to grow in soft agar. Therefore, the capacity to proliferate in soft agar is not a general property of cells that are resistant to reovirus, even in clones that contain genes disrupted in the IGF2 or related pathways.

[0136] Insertional mutagenesis provides an approach to identify genes associated with selectable cellular phenotypes. In the present study, one clone resistant to reovirus lytic infection contained a provirus inserted into the CTCF transcriptional regulator and overexpressed IGF2. CTCF binding motifs are present in many genes, including IGF2₁₈/H19₁₉, and c-myc20. However, since 3 other clones selected for reovirus resistance contained mutations in the IGF2 pathway, the role of IGF2 in virus-resistance was investigated further. Forced overexpression of the IGF2 gene in the parental RIE-1 cell was sufficient to confer cellular resistance to lytic reovirus infection. By inference, inserts affecting other genes in the IGF signaling pathway suggest that mutations in multiple genes may affect the same phenotype by acting on a common pathway.

[0137] As the entry, disassembly, transcription, translation, and repacking of viruses share common features; it is possible that common cellular pathways will influence infection by other virus families. The present study is the first to show a direct connection between IGF2 gene expression and virus infection.

[0138] The data presented herein also suggests that the level of IGF2 expression correlates with the capacity of cells to proliferate in soft agar, a surrogate for the establishment of invasive cell growth. In addition, this invention has defined a novel dominant negative variant that shares virtually the entire sequence of the mature hormone, but lacks a major portion of the E-peptide.

### Entrapment Mutagenesis and Selection of Reovirus Resistant Clones

[0139] To identify genes that may interfere with reovirus' lytic infection, a gene trap retrovirus shuttle vector, U3NeoSV1, was used to generate mutagnized rat intestinal (RIE-1) cells₁. A library of mutagenized RIE-1 cells were generated following infection of the vector, multiplicity of infection <0.1, and selection in media containing G418 sulfate (0.7 mg/ml) (Clontech, Palo Alto, Calif.), 1 mg/ml₁. Twenty libraries of mutant RIE-1 cells, each consisting of 10₄ independent U3neoSV1 vector insertions, were generated and expanded until each mutational event was represented by a sub line of approximately 10₃ sibling cells. These cells were plated at low density and incubated in serum-free media for 3 days until they became quiescent, infected overnight with reovirus serotype 1 at a multiplicity of infection of 30 plaque forming units (pfu) per cell. The infected cells were detached with trypsin, DMEM medium containing 10% fetal bovine serum (PBS) (Hyclone Laboratories, Inc., Logan, Utah) was added and the cells were allowed to reattach. After 4-6 hours the medium was replaced with serum-free medium and the cells incubated for several days until there was microscopic evidence of only a few cells attached to the plastic of the flask. Cells that survived the selection were transferred to cell culture plates in media containing 10% FBS and cells were divided for extraction of DNA and freezing

### Identification of Genes Disrupted by Gene Entrapment

[0140] To identify the gene disrupted by the vector in clones surviving reovirus infection, the shuttlevector property of U3NeoSV1 was utilized. Regions of genomic DNA adjacent to the U3NeoSV1 provirus insertions in clones resistant to reovirus lytic infection were sub cloned by plasmid rescue, and sequenced1. Sequencing was done using an automated sequencer (ABI 3700 DNA Analyzer, Applied Biosystems, Foster City, Calif.), and the results obtained were compared to databases available in the public domain (BLAST nr, est. and hgts). The probability of a match to sequences in the databases occurring by chance alone varies due to interspecies conservation and the length of the match. Matches to characterized genes were considered significant if the probability score was p<10₋₅ and involved non-repetitive sequences. As indicated, virtually all of the genes identified had matches to murine, rat, or human gene sequences with p<10₋₁₀.

### IGF2 Expression was Assessed by Northern Blot Hybridization

[0141] Total RNA was isolated from cultured cells using Trizole reagent (Gibco/BRL). 5 mg of RNA was separated on 1.2% agarose gel, and transferred to a Nitrocellose membrane. Membranes were hybridized with random prime-labeled (Strategene) probes corresponding to a full length of IGF2 cDNA and a b-actin cDNA.

IGF2 cDNA Isolation and Expression

[0142] Rat IGF2 cDNAs were obtained using reverse transcriptase PCR (RT-PCR). Total RNA was extracted from RIE and 6B72 cells using Trizole reagent (Life Technologies, Rockville, Md.). RT was performed on 1 mg of total RNA (PTC-100 programmable Thermal Controller, MJ Research. Inc, Watertown, Mass.). A pair of primers was designed according to rat sequences: CTTCCAGGTACCAATGGGGATC (forward) (SEQ ID NO: 429) and TYTGGTTCACTGATGGTTGCTG (reverse) (SEQ ID NO:430). A 500 bp DNA was amplified under following conditions: 95° C., 1 min; 40 cycles of 95° C. 30 seconds, 60° C. 30 seconds and 68° C. 3 minutes; 68° C. 10 min; 4° C.

### Immunoblotting Analysis

[0143] Cells were washed with PBS and lysed in SDS Lamelli buffer. Protein concentration was determined using the bicinchoninc acid protein assay (Sigma, St. Louis, Mo.). 20 mg of protein extract was loaded in each lane of a 10% SDS-PAGE and run at 100 V. Protein was transferred to a nitrocellulose membrane at 22V overnight at 4° C. The membrane washed three times with TBST (50 mM Tris pH 7.5, 150 mM NaCl, 0.05% Tween 20) and then incubated in blocking buffer (TBST and 5% nonfat dry milk, pH 7.5) for 1 hour at room temperature. The membrane was then incubated with anti-mouse, CTCF (1:500, BD Transduction laboratories) and b-actin (1:3000, Sigma) in blocking buffer overnight at 4° C. Following washing (×3), the membranes were incubated with goat anti-mouse secondary antibody (1:20,000, Jackson ImmunoResearch Laboratories, West Grove, Pa.) for 1 hour at room temperature, followed by three 15-min washings. Immune complexes were visualized by addition of chemiluminescence reagent (Renaissance, DuPont NEN, Boston, Mass.) and the membrane was exposed to Kodak XAR-5 film (Eastman Kodak Co., Rochester, N.Y.).

### Transfection

[0144] Cells were cultured to semi-confluence and plasmids expressing wild type and variant IGF2 proteins were transfected into RIE and 6B72 cells using SuperFect Reagent (Qiagen, Inc. Valencia, Calif.) according to the manufacturer's protocol. After 48 hours, transfected cells were passaged, 1:10, into medium containing hygromicin (selective medium) at a concentration determined to kill 100% of non-transfected cells (150 mg/ml). Cells were maintained in selective medium until clones appeared.

### Soft Agar Colony Forming Assay

[0145] Dual layers of sea plaque agarose were made with the bottom layer consisting of a 50:50 mixture of 1.6% agarose solution 1:1 and 2× medium. The bottom layer was allowed to set for 4 hours, and then a 50:25:25 solution consisting of 2× medium, 1.6% stock agarose, and 1× medium containing cells, at a final concentration of 5000 cells/ml, was vortexed in a conical tube, and 2 ml was added to each well. Following 30 minutes at room temperature to allow the upper layer to set, plates were incubated at 37° C., 5% C02 incubator for 7-10 days and checked for colony formation by microscopy.

### Cell Proliferation Assay

[0146] RIE-1, 6b72, or IGF2 transfected RIE-1 or 6b72 cells were seeded at 5×104 per well in 96-well plates, incubated at 37° C. and 5% CO2. At 4, 6, 18, 48 hours post plating, MTS/PMS, 20 ml per well (CellTiter 96 Aqueous Non-Radioactiver Cell Proliferation Assay, Promega, Madison, Wis.) was incubated for 2 hours, and then the absorbance was determined at 490 nm. Each set of conditions was repeated in triplicate.

### Example III

### T. cruzi

[0147] The methods of the present invention have identified cellular genes involved in the pathogenesis of Trypanosoma cruzi infection of mammalian cells. T. cruzi infects many cells including muscle cells and epithelial cells, among others. Insertional mutagenesis was utilized to isolate positional sequence tags that define regions of DNA that contain DNA that encodes for genes necessary for the infectious cycle of T. cruzi. In the process of characterization of genes that have functional roles in the replication of T. cruzi one PST was found that is essential for both T. cruzi and reovirus replication.

[0148] Chagas' disease affects millions of people in South and Central America. Trypanosoma cruzi, the protozoan which causes Chagas' disease must attach to mammalian cells before it can invade them. The disease is acquired when a host is infected by invasive trypomastigotes transmitted by an insect vector or during blood transfusion. Cases of blood transfusion-related Chagas' disease have been reported in the United States where the disease is not common. There are estimated to be more than 100,000 infected persons residing in the United States, and it has been suggested that cases will be encountered in increasing numbers. Trypomastigotes attach to and penetrate mammalian host cell membranes to multiply intracellularly as amastigotes. Amastigotes then transform into trypomastigotes that are released from these cells to infect neighboring cells and disseminate in the body.

[0149] The methods of the present invention were used to select cell mutant clones of rat intestinal epithelial cells (RIE-1) that are resistant to T. cruzi infection using gene trap retroviruses. For this purpose, RIE-1 cells were randomly mutagenized with a retroviral vector (U3 gene trap) containing neomycin and ampicillin resistance gene markers. A library of gene trapped RIE-1 cells was infected with the highly invasive T. cruzi trypomastigote clone 20A at a ratio of 20 parasites per cell. Control monolayers of wild-type RIE-1 cells were also infected with the same density of T. cruzi. After several cycles of T. cruzi infection, cell lines were selected for their ability to be resistant to T. cruzi infection and then for their ability to be resistant to G418, a neomycin analogue that is cytotoxic to mammalian cells. These cell lines were cloned by limiting dilution and two clones named A:11:4:C5 and C:8:2:B4 were selected for further studies. It was found that A:11:4:C5 and C:8:2:B4 clones released very few trypanosomas, whereas wild-type RIE cells released many trypanosomas. Kinetics of infection of A:11:4:C5 and C:8:2:B4 clones and wild type-RIE-1 cells with T. cruzi indicate that mutant clones A:11:4:C5 and C:8:2:B4 do not support T. cruzi infection as indicated by the dramatically low number of intracellular parasites within these cells as compared to high level of infection seen in wild-type RIE-1 cells. This pattern of low T. cruzi infection seen in A:11:4:C5 and C:8:2:B4 clones is constant during the cycle of infection of T. cruzi in rat epithelial cells observed from 1 to 5 days. Further analysis of two cell clones demonstrate that the block in the parasite's infectious cycle occurs after the binding of the parasite into the mutant cells. It was shown that binding of parasites to the mutant cells is similar to the binding of parasites to the parental cells. However, entry of parasites into each cell line was diminished. For another mutant cell line, entry was similar to the parental cell, but the ability of the parasite to be released from the phagolysosome was dramatically affected.

[0150] To investigate this hypothesis the features of the gene-trap vector were manipulated to derive a rescued plasmid from each clone. The resistant (R) clone obtained by EcoR1 rescue and BamH1 rescue gave two plasmids representing over 10 kb of DNA. The downstream sequence has significant identity with several rat EST sequences identified and submitted to the gene bank on behalf of NIH's rat genome sequencing project.

[0151] The second clone is designated most resistant (MR) based on its quantitative resistance to intracellular T. cruzi infection as compared to the wild type cell line. The genomic sequence that was rescued from this clone is approximately 4.5 kb with significant homology to a protein phosphatase pp2a B′ regulatory subunit gene. Because of several anomalies, the MR cell line was subcloned and from a pool of 50 clones MR-6C2 was selected, which again upon conducting plasmid rescues yielded a sequence with identity to the pp2a B′ regulatory subunit. By reverse transcriptase followed by polymerase chain reaction (RT-PCR), using primers designed from the human pp2a B′ regulatory subunit homologue, we have been able to show that the RIE wild type cell line expresses a pp2a B′ regulatory subunit while the MR-6C2 clone does not amplify a product in parallel experiments. These data indicate that this gene is no longer expressed in the selected clone.

[0152] Several other clones have been isolated. One of these, 8B1, has the phenotype of diminished binding of parasites to the cell surface. By plasmid rescue, a sequence of genomic DNA was isolated that has a 100% homology to the rat lectin-like oxidized LDL receptor gene (LOX-1). The 1,6-kb genomic fragment gives 100% identity when sequenced with both Lac (5′ distal) and Neo (5′ adjacent to the vector) primers. The insertion resides at base #6120 in the reported sequence₁₉. Our genomic fragment extends 5′ to an EcoR1 site just prior to the TATA box of the promoter position (#4774). This positional sequence tag (PST) is consistent with the published report of the position of this restriction site. Analysis of the clone indicates that insertion has taken place into intronic sequence after the first exon and the rescued sequence appears to contain the coding sequence contributed by the first exon. The first exon is found at nts 4800-4937 of the rat genomic DNA for exon 1 and the promoter region. The vector resides at nt 6122 and the reporter gene would be expected to be transcribed from the same strand as the LOX-1 gene. The LOX-1 gene is 3.75 kb, and the organization of the downstream exons is not reported to the database.

MR-b4 . . . ,identity with est: EST230513 Normalized rat lung.
(SEQ ID NO: 419)
GTTAGGCCCTCTGAGTCCNTNACTACCCGTCAGCGGGGGTCTTTCACACC
CTTTACCTACCCACCCTGCATCCCAACATGTCATGTGGAAAAGTCCTCAT
TTTTTATATTGAGAAGGGTTTTTTGTTTGTTTGATTAATTTTTGATTTTT
CAGTGAANTCATTTTCTTTGTGTCAATACCTTTTTCTCTACACTTACCAG
GCTGTTGTAAGAAATAAACTGAGAAACATTTGATCTCTCCTCTTCCTCCA
CCAAGTGCTGACCCTCAGGCTGCACCACCAATAAATAGGGACCTGAAGAA
AGGAATGGGAGTTGTGTTTATTTAAAAAAAGATTAGACAGAAGGAATACG
TTTGGTGGATGTGTATTCAGG TTTGGTGGATGTGTATTCAGG
P4c5e/NeoC
(SEQ ID NO: 420)
CGATCCTCAGCTAGCTTG
CCAACCTACAGGTGGGGTCTTTCACCCTGTACCTGTTAAGCTCATCTCACC
TCCCTGCCATTTTCTGGATGAATTCTTTGTCAAACCAATCTCAAGCCGTTG
GCAAAAATACTCTACAGCACTTCAAAGTGAAGTGCAATCATTTTTCTTTTC
TACCCCAGGAACACAAAGATTTTCCAGCACAATGTAGAACTGACGAGAAA
TGGAGCAGGGGAACATCCAGCACACGAGCAGCTCTGAGGTGTGGGTGTGT
TAGCTCAAACTNCACTTNCCATAAAGTAGAGGTGAGGAGGACAGGGTAAC
TTANAGGAGGCAGAAAGAAAACAACAGNATNATAGTTGACCCTGGGAAG
GGGCTCTACGTGTTGTGGGTGCTNCCAAACCCAGNTGGNCAATNAATGCA
CTNCTACTNCATGGTGGCTTGAGGAAAGGGCTGGAGTNACTAAAGNCGGG
NTGAGGAGGGTGGATNATNGNGNCTGCAGATNGGNCCTGNTTGNAGGTN
GNNCTGNTGNGGNNTGTGGGGNAGACAGGATNGGGTGTGGGGGGGGNTN
GNTGGGNTGGNANTGNCTGTGGNGNCCAGGNTGGGNTGGGNCTGGCNNG
ATGNTGNTGGCTGTGGNNTGNTGGGGGCTNGGNTTGAANGTGTGGCNCNG
GGNGGCNTNGGNTGNGGGNANGGGGNANGGGNTGNGTGGGGGGGGAGT
GGTGGGGGGTGGGTGNNGGTGGGGGGNCCCTTGGGGGGNTNGGGGGTNG
GNTNACGTGGCNNGNGTNGGGGAACTGNGNNGACGACGC
>
gi|18846965|gb|AC109110.2|Rattus norvegicus clone CH230-28 . . . 688 0.0
P4C5c/LacO >
(SEQ ID NO: 421)
>TTTNCACAGAATNCAAGCCAGAGGCTCAAAAGTAAACCTACACATCCTGT
TCACAAAAGCACTGGGCACAATTGCTAGAGGCTAGAAGAAGCCCAAGTAT
CCACTTAACAGGTAAATGCCACACGCCTGCAGTGCCTTTGCTATTCACCTG
TCAGAGGGAAGGGAAGCCCGTTCATGCTGCAGCATGGGTGTTCTGCACAG
TGAAGAATGAACTATGGTGGCTGTGCTTTCCAGTTCCGATGAGTGGGCATT
TAGGAGGCAAAGAGAGAGAGAGCACACAGCAGACTGAAGCAACCTGTAG
ACAGCAAAAGCTCATCCAGTCAGGGCTCACAATAGCCAACAATAGAGAC
GACTACCGCAGCCTGATTGAAAGAGGGAGCAAAAGGCATCAAGTTGGTG
CTCACAACATCCCCCATGAGTCTGCTGTCGGANCAGTAGTCCTGCTGGAGT
TCTGAGTGGAGGGTCCTGGGCAGAGCANANCAGTCTCCATGGATGAGCTT
CATAGTCTGTTGCCAATGGTTACCTTCTAGCTGTTGTCAANAGCTTGTTTTT
ACTGNCAAGATGTGTTGCTGTTGTCAATNCCCANACAANGGCCCTTANAG
GACAATATGAGATAGGCATGGGTGGGCCTGAAATGGGGGGAAGGAGAGG
GGTNAATTGCANNTTGGCAAGGAGGGCANACANCACTTGNTGGCTGCTAC
ACTNTATNGGGGAGGGGACCAAAGGNGCCATGANGAATGGTNNTGATGG
NANTTGCTTGAGGGGGCGTNGNAAAATANAAATNGGNAAAANGATTGTT
TNGCNTTTTTTTTAANNNGANGGGTATGAATNNNNNTANACCTNGNGGNG
GGAAANANCN
> gi|18846965|gb|AC109110.2|Rattus norvegicus clone CH230-28 . . . 605 e−170
P4C5 c/NeoC . . .
(SEQ ID NO: 422)
CGATTTCTNAGCTACCTTGCCAACCTACANGTGGGGTCTTTCACCCTGTGC
CTGTTNAGCTCATCTGACACTGGCCTGCCATTNTNTGGATGAATTCTTNGT
NGAACCAATCTTAAGNCGGNGGATNAAATACTGNTACAGNAGCTNANNA
GTGAAAGCG
above sequence-first 46 are vector.
Note: this next gene is a LAC (5′ not connected to the vector sequence) of
P8A3-it is in the Rat tryptase 2 gene.>
>
P8A3a/LacO . . . , gb|AF011446|AF011446 Mus musculus granzyme K
gene, complete cds
Length = 5747, 2e_99, and gb|L19694|RATRNKTT2A Rattus
norvegicus tryptase 2 mRNA, complete cds. Length = 884, both
negative strand.
>
(SEQ ID NO: 423)
TTCACAGAAACCTAGGGTGAAGGGTAAGGCTGGGGAAGTAAGGAATCTG
CAAATCCATCGTGAGTGCATACACGCAGAGTGTCCTCTGCAACATATCTGT
GCTTACTAAATGTGTCAGTTATTCTGAAATACCTTAAAAAATAAAAACAC
CAAGTCTCAAAACCGCACCAAGAAAGAGACAGTAACTTTCCCTTGCACCC
AGGCTTCCTTTCAGCAATTGCAGTTGCTTGTGGTCAACTGCTGTTGAAAGA
TTACATGAAATATTCCAGAGACAAATGATACATGCATTGAAAATTACATA
TTAGAGTAGATTGATTGAATTGTGCTTTGATNGCCATTGTTAATCTTACTG
TACTCAGGNNCTTGACTAGACTTTATGTTATGCGTGTCATTTATCCTGGAC
ATGGACCACCACATACATGGAAAAGCACAGGGGACTGACCGAGAGTAGC
ANTGGGCCGGCTGNTANCACCCACTGCGGATGGATNANGACTGNCTGCCA
AATATNCTGGGCGGGGTGCTGGATGGAAGCCATAGAAGGCGTGNAATGN
GGNTNNNCT
>
gi|3169700|gb|AF011446.1|AF011446 Mus musculus strain 129/SvJ 216 2e−53
gi|8393512|ref|NM_017119.1|Rattus norvegicus granzyme K (G . . . 66 4e−08
>
P8A3C/e . . . , reverse complement, 862 bases, 2600 checksum.
(SEQ ID NO: 424)
CCCCCCCCNCANNCCCCACACACCTCCCCCGCCNCCTTCACCCCANCNCA
GCCCNAGCCCCCNCNCCCACATTTCCACANCCCACCGNGCNTCTTTCCCA
GNNCGNATNTNTCCAANCAGNTCCCNCCACATCCNCCANCCCCCAGTNCA
CGGGGCCNCCCCATCCTNNCNGNCCCACAGGCCANCTTTNCCCCTGTCCC
CATTCCCCACCCTNCCTNTCATGNCCCCTNAGTANCNNTCANCAGCCACN
CTNCCCCTTNATCCCANCNCTGTGCACACCTTTTATTCCTGTGNCCCNCN
CCCAATGTCTCCCACCTTTCTGTTCCATTTTTCCCNCATAGTTCCCAANN
CNATTCTGGGNAAAAGCAGCCATCAAGGCCCACTTTATAGTCCANAATNC
TGGNCCTGCCTTNNAATGTCCTCCTATATTNAGTNACCGCACCGCCTTTA
AATCNACCATCATGCAAAGTGGCAGNATGCANACAAATTGTANAAAAGCT
CTTCGCCTGAGCAGCACTGTGGATCTCCTAGTNAAGTTGGAGTGTGTACA
CTACACCCCAATATCTTAGAAAATTCCCAAGAGAANACTTCATCTTTTCC
TCTATAAATTTGCAAGAGAATAAAAGGATGGTAAGACAATTATGCCAAAT
TAGACCTTTAATCAAGAGATTACAAATTATAATGTCTACTACCCTTCCTG
AATCTATGAAGAAAATTAAAAATACACTATAATAATATTCATAGTTGTTT
ATTTAGAGCATTTGCTTCTCAACTTTAAATATTAGTCTTTTATTTCTTTA
CGCCCATAATATCAGGAACCAGTGAAAGACCCCACCTGTAGGTTGGCAAG
CTAGCTGAGNAT
>
P8A3a/E . . . , reverse complement, 640 bases, 55F checksum.
(SEQ ID NO: 425)
GGGNNTNANGGAGNCNCGNGGCGCNCGGGCNTNGCCCGNTANCGNGGNG
NGCGGGGNGNGGAANNTNAGGNCNGNNAACAGAGGCGGNGNNGCGGCG
CTGGGNNNNGGNCCGGNNGGCCCGGNGGGTANAAGNNGAAGTGNTNAGN
GGTGGGGAGGNANNNGACGNTGGGNNCGANNNNCGCNGGGGANGTGAA
GCCNGCCNGTGCNGGGNAGNGGGCGGNNNTGGGGGNGNGGGCCANNNN
CNGNATGAGGNGATGNTGNGGNTGGGCGNAGGNNAGGCGGGCGNGTGGC
GNGNNGCGGTGGGGNGNGNNGGAANNGANNTGGCGNGCNNCCGAGGGN
GNGATNCNNCGCNCNGNGGAGGGNCNGGNGATGNGTCNNAGANGGTCGG
NGGNNGGCNGGNCAGNNCGTGCNGTNANGNCNTNGNGATCANNGAGGGT
GNCCNNNGGNANGAGTCTAGGGGCGGCCCTNTCGTNNATNCNANGNGGG
CCGATTCNCGCATNCGCNNATAATCATATTCCATAGTTGNTTATNTAGAGC
ATNNGCTTGTCACCTTTNAATATTAGTCTTTNATTTCTTNACGCCCATAAN
ATCAGGNACCAGTCGNAGACCCCACNTGTAGGTTTGGCAAGGGTNGCGAG
NA
P8B1-E . . . , dbj|AB018097|AB018097S1 Rattus norvegicus gene for lectin_like
oxidized low_density lipoprotein receptor, exon 1., rev, 827 bases, 1EA
checksum.
(SEQ ID NO: 426)
TANAAAGANGNCANAAANGCNNCNTTCAGAGNCCCAAANNTATTTTGTGT
GTNNTNAAGNCTGCAAAAATGGGNAGTGTTTTGTNAGTATNTAAGCAGAT
TNGGTATATTCAGNCGGCCAAANANACATTAGACTCTTTGTCCATTGTTG
GCTTTAAAAATTGTAGCTTGTACTTCNCTATCCAGTAAACTTAATTACTT
ANGCTGAATAGATAACTCGATTCTGTAGAAAACTACAGGTAAAACATCTA
TTATTTTATAAAATCGAGAGAAAAAGGCCAGGTAGGTGCACACCTTTAAG
CCCAGCACTTGGGAGGCAGAGGCAGGTCACCTGCTCTACAGGGTGAGCTT
TAGGTCATCCAGGAATACACAGAGCAACCCTGACTCAGAANCAAACCCAA
AAAAAAAAAAAAAAAAGGAACAAATTGTAAGAAGAGGAAGAAAGGCAT
AGTGTGTCTGTAAATAAGCCTGAAATCTCTCAGTGGGTAAGATAAGGCCG
AGTGTGGTGTGATTTAATGTCTGAGTGACTGAACTAGCTCAGAGTCAGGA
CAGTGCTGGAGCTTGGTAGTAGACCCAGCAGCAGTGGAGCTAGCTTAGTG
TGAGAAAGTGCTGGTGTTTAGTAGTAGATGTAGGAGCTAGTACCACGTGT
GAATTTGCTCAACCACTCATTCATTATTTGTGCAGTAAATATTGTTTTCTAA
CCTGACTTTTACCATAAATACAACTAGTTCTTCTTTAGGAGCCCTGGTTAG
ACTATTTACTGTGGTATAAGCTATATACTGAAGTTAGTGTGAAAGACCCCA
CCTGTAGGTTTGGCAAGCTAGCTAG
>
gi|4008162|dbj|AB018097.1|AB018097S1 Rattus norvegicus gene . . . 743 0.0
>
Sequence of homology with the vector sequence and the LOX-1 genomic fragment.
dbj|AB018097|AB018097S1 Rattus norvegicus gene for lectin-like oxidized
low-density
lipoprotein receptor, exon 1
Length = 8960
602601
Nucleotide, Related Entries, Protein, PubMed, LinkOut
LOW DENSITY LIPOPROTEIN, OXIDIZED, RECEPTOR 1; OLR1
>
LECTIN-LIKE OXIDIZED-LDL RECEPTOR 1; LOX1
OXIDIZED LOW DENSITY LIPOPROTEIN RECEPTOR 1
Gene map locus 12p13-p12

[0153] Endothelial cell dysfunction or activation elicited by oxidatively modified low density lipoprotein (Ox-LDL) has been implicated in the pathogenesis of atherosclerosis. Vascular endothelial cells internalize and degrade Ox-LDL through a putative receptor-mediated pathway that does not involve macrophage scavenger receptors (see MSR1; 153622). To identify genes encoding Ox-LDL receptors, Sawamura et al. (1997) transfected mammalian cells with a cDNA expression library derived from bovine aortic endothelial cells and assayed for uptake of labeled Ox-LDL. They recovered a cDNA encoding an Ox-LDL receptor, which they designated lectin-like Ox-LDL receptor-1 (LOX1). Immunofluorescence studies showed that bovine LOX1 is expressed on the cell surface. Sawamura et al. (1997) cloned a cDNA encoding the human homolog of LOX1 by screening a human lung cDNA library with the bovine LOX1 cDNA. Cells stably expressing human LOX1 showed uptake of labeled Ox-LDL. The predicted 273-amino acid human LOX1 protein is 72% identical to bovine LOX1. Its structure is similar to that of C-type lectins such as CD94 (KLRD1) and NKR-P1. (KLRB1). Northern blot analysis revealed that human LOX1 is expressed as a 2.8-kb mRNA in various tissues, with the most abundant expression in placenta. Yamanaka et al. (1998) determined that LOX1 is expressed in vascular-rich organs but not in lymphocytes.

[0154] Yamanaka et al. (1998) found that the LOX1 gene spans approximately 15 kb and consists of 6 exons. By fluorescence in situ hybridization, they mapped the gene to 12p12-p13, where genes of the natural killer cell receptors are clustered.

### Erlichia

[0155] The selection methods of the present invention were used with a highly susceptible cell line that is commercially available, DH82 cells, that were obtained from the ATCC. The cells were infected with a vector of the present invention and a library was created of mutant cells. The mutant cell library was selected with Erhlichia chaffeensis, Arkansas strain, that was obtained from a laboratory sample from an infected individual. Surviving cells were re-exposed to the infectious agent, 1:100 infected to naïve cells [infection of naïve cells requires the presence of infected cells for infection-cell to cell contact]. A single cell clone was derived from a library of approximately 1 to 3000 unique inserts. The clone has a disrupted fastK gene.

[0156] The parental cells are susceptible to apoptosis during the course of Ehrlichia chaffeensis infection, whereas the mutant cells are not susceptible. However, chemically induced apoptosis is preserved in the mutant cell clone (susceptible to anti-neoplastic drugs). An expression cassette was created using a macrophage specific promoter and enhancer and the human fastK gene. It was found that the phenotype of Ehrlichia susceptibility can be complemented in the cells that express the transgene in its appropriate (positive) orientation. The transgene expressed in negative orientation did not have a phenotype with the mutant cell clone used as the recipient.

(SEQ ID NO: 427)
11-d11-erlichia sequence from dog, Rubin.Seq LENGTH: 1101 CHECK: 332 . . . ,
reverse complement, 919 bases, 2339 checksum.
ACCGGAACCCCGTTTTTTNTTGNNNGGGNTTTAACCCNNATTTGGNGNCC
GGCCCCGGTNCNGGGNTTNNTGGAAAATGNCNNNCTCGNTGGCCTTCCNA
TTAANANGCCNNGGGGAAGCCCGTCTCCCGGNCCCCANNNCNATTAGGA
ACCACCNTCGCNGGNCTTGGNACCCATTTAGGGGTGGCCCTTCCGGNCGG
CTTCGGAAGGNCGNCGGTAGTTGTTGTTGCCNACCGTTAAGACGGTCTCC
GGGCGTCNCCNGGCTTCCCCGGNCCGGTTGGTTTGGGCCCCTAACACCGC
CGACTCCGGCCATTNCAAAGCCGCGCGCTCGGGCTTCCACGGGGCCCCCN
TGCNANCTGGGCGTTGCGTTCTCGTTTCACGGGCGAGNAGGCTTGGCAAA
AAGACGAAGCCACTTTGTCCAAGGTCATGCAGTTGGTAAGTGGAAGCGCC
CCAAGCATTGNAACCCCAGGTCCCGGCCCCGCTTCCCGAAGCCCCGGCGT
TTCCCACCCCTTCCTTTGCCCGCTGCCCGCCTTCCTTGCGGGNAGGGGAGN
TTGNTCAAAAAGGGGCGTGTCGACAGGCAAGTTGGGNTCCAGGTTGGGCC
CGACCCACTAACCCGACTCGTTGCCCTGGGGCTTTACCCCCCCCCNTTTCC
TTTTTGGNCTTTGGTTTCTCCNCNTGTGAAATGNAGGTAGTGCCAGCCCTG
CCTNCCTCAGAGGCGCGTGCGGAGCATCAGAGATCCATAGTGCATGTGNA
ATTGCTCTGTAAATATCCCTGTGCGAAGNACATGGAAGGTGCTGCTTTAA
AGGATGGAAGGAGNCAGAGAGGGGCGGGGTGGGGAAGACTAGAGCAAT
CACAGAGGAAGGACGAACATGAGTGGGTGTTCTTGAAAGACCCCACNAT
NGGTTTTCNAAGCAANGGG
(SEQ ID NO: 428)
12-d11-Laco.Seq LENGTH: 1159 Mon, Jan 31, 2000 2:51 PM CHECK: 6877 . . . , 992
bases, 15A5 checksum.
ATTACNCTTTNNACAAGGCCNGGACGAGACTCAGTGGATTCTGGGAATCA
TGGCCTTTGTGTCACAGAAGATGCCCTGNCAGGCGCCTTCAGGGGGTGTT
NNGGGGATGGGGGGCACNGCGGTCACAGGGTCACTGTTAAGGAAGTTGG
AGCTGGATGGGAATCCAGCTGATTCTGNCCCTCCCTGCTCTGGGAAAGTG
CTCTGCCGCAAATGTCTTCCTTGCCTCACTCCCTATGTGCCTATNNCACCA
AGGNTGTNACCAAAAGGAGCTNGGGGTATTTTAGAGCTGATGGGGAACTT
CTACTTTCTTGNAAGGGCAAAGAATANTCGNTCGNTGTGCCCCACCTGCTT
NAGATCTAGGAGGAAAATCTGGGNANCTCCNGNNTTTGGGGCCCTNNGCT
CACACAAATGCCAACTTCTGGTCCCCACCCNACGGGTGATTTAGGCCANT
TACTTAGATCCACGTTAATGAAGTTTTTCTGTTGCCTAAATTAGTTCACAG
GGAACTNAGCCTTGGGAAGAAAAANAANCTAAGAGGATTTGNTGAAAGG
ACACAAGGAAGTTATGTNNGGNATGTTTCAAGANCAAGGGCANGNACTTT
AGGGTTCAAANNGGGGGTTTTTTACTCCCATCCCAAAAATACTGGAATGG
NTTCTTTNCCCAGGTTGNAGGGGACCCTCCCAAAAGCATAAAAAGGGGGG
GTGTTTTAGNGTTGAAAAAAGGCCCCCAAAAGCNCTNACANCCAATAATG
GGGGAATNTGGACCCCTTAAATTGTNAANGGCCCCAANAAAATGGGGNC
NGGGCCCTTNNNCCCAAAATTCAATGNTNNTTNNCCCCNNNNNNAAAAAA
ANTTNAANGNNCCCCTTTTAAANAAATNTNTTNNNGGNCTNNNNANANGT

### Additional Properties of Genes Necessary for Viral Infection

[0157] Table 1 provides a list of all sequences obtained utilizing the methods of the present invention. This table provides, from left to right, the Lab Designation, the gene comprising the Lab Designation sequence, human chromosomal location (if available) and any matches found in three publicly available databases (BLAST nr, est, and hgts). The database matches appear in the three columns immediately following the chromosomal location designation. Table 2 provides Lab Designations and additional information for a number of the clones isolated utilizing the methods of the present invention. Further description of the identified genes is provided following Table 2.

TABLE 1

| | | | | | |
|---|---|---|---|---|---|
| 06_RA2#E_rE.txt | gi\|17456622\| | 8q11.1 | 0.23 | 0.20 | 0.0 AC090206.3 h |
| 10_2A_3_12-rE.txt | gata4 | 8p23.1-p22 | 0.58 | none | 9e−28 AC099091.2 r |
| 10_3A_2_Lac.txt | PPM1A | 14q23.1 | 0.057 | 2e−4 AA089094 | 9e−91 AC107409.2\| |
| 10_3b(5-2-96)_rE.txt | na | | H | none | H |
| 10_3bE_rE.txt | hp1-bp74[EIF4G3] | 1p36.12 | 5e−05 AL138784 | 7e−07 AW533300 | 6e−05 AL606477 |
| 10_3b_2_rE.txt | KLHL6 | 3q27.3 | H | 8e−10 AW915888 | H |
| 10_4A_8_rE.txt | gas5 | 1q23.3 | 1e−07 BC004622 | 8e−08 BI303289 | 0.41 |
| 10_4b_4_rE.txt | KLHL6 | 3q27.3 | h | 2e−69 AW915888 | 0.018 AC069211.12\| |
| 11X#17_Lac.txt | na | na | 6e−05 satellite S64630 | 0.17 | 7e−08 AC107099.2\| |
| 12C#A_rE.txt | LOC159772 | 11p15.3 | 0.51 | 4e−04 BF849606 | 2e−04 AC084304 |
| 12CX#11E_rE.txt | LOC168349-[LOC168348+] | 7q33 | 7e−30 AC024913.32\| | 1.31 | H |
| 12CX#6_rE.txt | zfp-36 | na | 2e−11 AK018350 | 3e−36 BF548520 | e−178 |
| 12CXY#7_Lac.txt | prss11 | 10q25.3-q26.2 | 2e−17 satellite | 5e−11 repetitive 0.0 | AC110392.2/AC087063.17 |
| 12CXY#7_rE.txt | prss11 | 10q25.3-q26.2 | H | none | 7e−13 AC087063.16\| |
| 12C_2B#9B-B4.txt | na | na | H | none | H |
| 12C_2B#9E_rE.txt | LOC160196 | 11q24.1 | 2e−20 | 1e−20 BI105708 | 2e−20 AC016859 |
| 12PSA#6_rE.txt | EIF3S10 | 10q26 | 9e−47 MMU14172 | 8e−53 AI597159 | 1e−30 AC026587 |
| 12_3B#10-rE.txt | LOC164360 | 20p11.22 | H | 0.18 | 0.0 AC114195.1\| |
| 12_3B#10_Lac.txt | na | h | 1e−20 H32702 | 0.0 AC114195.1\| | |
| 12_3B#2_Lac.txt | jwa {UBE1C+] | 3p14 | 0.23 | 0.18 | e−123 AC109665.2\| |
| 12_3B#2_rE.txt | GTRAP3-18- arl6 (jwa) | 3p14 | 5e−58 AF240182 | 2e−53 BF543062 | e−111 AC102724.1\| |
| 12_3B#7_Lac.txt | DKFZP727C091 | 17q21.31 | 8e−68 S82811 | 2e−40 BE122674 | 1e−85 AC095637.3\| |
| 12_3B#8_rE.txt | Aptx | 9p13.3 .14 | 3e−8 AA871174 | H | |
| 12_4b#11_rE.txt | na | na | 0.13 | na | 0.15 |
| 12_4B#7-rE.txt | LOC13854 | 9q31.3 | 5e−73 AL389915 hu | none | e−102 AC073037 hu |
| 12_4b(#11)-Lac.txt | DKFZP727C091 | 17q21.31 | 8e−68 | 2e−40 | 1e−85 AC095637.3\| |
| 12_4b_9_lac.txt | YWHAE and loc14697 | 17q21.32 | 0.20 | 0.75 | 7e−14 AC102099.1\| |
| 12_4b_9_re.txt | | | 0.037 | .031 | .042 |
| 12_6B#6_Lac.txt | LOC148582 | 1p31.2 | 0.066 | 0.053 | 4e−13 AL669966.4\| |
| 12_6B#6_rE.txt | LOC148582 | 1p31.2 | 0.073 | 0.059 | 0.002 AL669966.5\| |
| 12_L24_5_3-Lac.txt | HCK and KIAA0255 | +20q11-q12 | e−128 AC078911 | 0.20 | 0.001 |
| 14A13E_rE.txt | gata4 | 8p23.1 | 0.034 | 1.31 | 2e−47 AC099091.2\| |
| 14A14E_rE.txt | | | H | none | H |
| 14A7re | smad7 | 18q21.1 | 3e−30 NM_030858.1\| | 2e−37 AI556846 | 8e−25 ACO24384.4 h |
| 14C_2E_rE.txt | srp19 | 5q21-q22 | 6e−19 ACO91750 | 2e−12 BA395473 | 2E−78 ACO99430.2 |
| 14G3E_rE.txt | | | H | none | H |
| 14H1E_rE.txt | | | H | 1.31 | H |
| 14H4Erepeatmasker_rE.txt | repeat | | 1e−04 | 0.031 | 5e−08 |
| 14H4E_rE.txt | repeats | | 1e−09 | 3e−09 | 3e−16 |
| 14XD#12E_rE.txt | CLR-B | | 4e−49 AF320597 | 0.17 | 5e−06 AC117852.1 |
| 14XD#12E_T7.txt | | | 1e−83 AF320597 | 8e−16 | 1e−24 |
| 14XD#18B_B4.txt | | | H | 1.31 | H |
| 14_24_#6_Lac.txt | LOC94765 [fer1I3-] | 10q23.32 | 4e−06 | 1e−05 | e−167 AC105467.3 |
| 14_7#2E_rE.txt | mgat1 | 5q35 | 2e−69 abo12876 | na | 0.0 BF392858 |
| 17_3_3B_B4.txt | | | H | 0.70 | H |
| 17_3_3E-rE.txt | | | H | none | H |
| 17_3_3Ea-E.txt | | | H | none | 1.31 |
| 17_3_3E_rE.txt | | | H | none | H |
| 17_3_3He_1-T7. | LOC162407+/LOC162406 | fksg4-17q23.3 | 4e−06 ACO05667 | none | 2E−70 AL596111.7 |
| 17_3_3He_1_T3_rev.txt | | | 0.23 | 1.31 | 0.29 |
| 17_3_3He_2-T7.txt | | | H | none | H |
| 18A_8_1E_rE.txt | loc158333 | 9p23 | 0.056 | 0.011 | 0.0 AC108575.2\| |
| 18A_8_3E_rE.txt | | | 0.13 | 4e−63 BF409287 | 4e−42 AL645668 |
| 18A_8_4E_rE.txt | | | H | 0.0 bf409287 | 1e−89 AL645668 |
| 18_5#13E_rE.txt | | | H | na | 1.31 |
| 191E2E_rE.txt | CALD1 | 7q33 | 6e−05 | 0.049 | 3e−35 AC102668.1\| |
| 191E8E_rE.txt | | | 0.059 | none | 0.29 |
| 191E9B_B4.txt | | | 0.004 | na | 0.003 |
| 191E9B_RB2_134.txt | MGC2663 | 19p13.2 | 1e−06 | 5e−05 BF561648 | 2e−11 AC073773 |
| 191E9E_rE.txt | | | 0.004 | 0.003 | 0.005 |
| 191E9E_rN80. | C lectin-related protein B | | 4e−43 AF320598S1 | na | 0.18 |
| 19D3E_rE.txt | | | 0.052 | 0.042 | 4e−37 AC113047.1\| |
| 19D5E_rE.txt | 6PTHS | | 1e−89 MM6PTPS1 | 1e−36 BF542916 | 0.0 AC094189.2\| |
| 19_7AE_rE.txt | DKFZP566D193 | 3q21-q22 | H | 0.49 | 5e−60 AC106523.1\| |
| 19_9BE_rE.txt | CTF2 | | Xq21.33 | H | 1.31 1e−74 |
| | | | | | AL671915.4\| |
| 1A_A549_6_rE.txt | RFP2 | 13q14 | 0.0 AF279660 | 0.0 BI668033 | 0.21 |
| 1a_b4.txt | | | H | none | 0.17 |
| 1a_rE.txt | | | 5e−04 repeat | 0.090 | 6e−04 |
| 1bw_lac.txt | loc168348 | 7q33 | 1e−30 AC024913.32\| | none | 0.32 |
| 20_L28AP-Lac.txt | LOC148904 | 1p36.11 | 0.41 | 0.33 | 1e−84 AL672076.2\| |
| 21_5_7E(2)_Lac.txt | id3 1p36. | 13-p36.12 | 2e−20 repeat K00498.1\|RATRSSIB | 2e−16 repeat\|BE122674 | 2e−23 AC112345.1\| |
| 21_5_7E_Lac.txt | | | 1e−24 K00498.1\|RATRSSIB | 2e−20 BE122674 | 2e−27 AC095096.2\| |
| 21_5_8E(2)_rE.txt | | | 2e−08 AL021154.1\|HS150O5 | 1.31 | e−107 AC060772 |
| 21_5_8E_Lac.txt | | | 4e−06 AL021154.1\|HS150O5 | 2e−04 AW917110 | 4e−56 AC060772 |
| 21_5_9E_Lac.txt | | | 0.003 | AC108468.3\| | 0.009 AI025166 |
| | | | | | 0.004 AC113355.1\| |
| 24_3_5#1_Lac.txt | | | 6e−11 AC068627.16\| | 1e−11 BI302094 | e−102 AC098054.2\| |
| 24_3_5#1_rE.txt | LOC162464 | 17q21.32 | 0.21 | 0.67 | 5e−46 AC069060.3\| |
| 24_9_3#2-re.txt | C lectin-protein C | 8e−72 | AF320596 | 0.003 | na |
| 24_9_3#2_Lac.txt | 7e−17 satellite | | S64631 | 5e−08 | e−135 AC108952.2\| |
| 24_A#1_rE.txt | TAC3 | 12q13-q21 | e−137 AC068609 | 2e−102 BG668235 | e−150 AC107006.2\| |
| 29A_5_1_Lac.txt | s100a5 | | 5e−15 AF088189 | 9e−13 AA555734 | e−128 AC027648.10\| |
| 2AE_lac.txt | | | 5e−38 satellite V01570.1\|RNSAT1 | 9e−24 | 3e−40 |
| 2a_b4.txt | | | H | none | H |
| 2B2_T3.txt | | | none | H | |
| 2B2_T7.txt | | | e−163 vector | 4e−33 | 1e−68 |
| 2b_b4.txt | | | 9e−58 repeat AC079437.2\| | 6e−40 BF398164 | 5e−69 AC116251.3\| |
| 2b_lac.txt | loc150800 | 2q31.1 | 0.034 | .028 | 3e−09 AC104088.5\| |
| 2b_rE.txt | | | H | none | 0.66 |
| 3'est off\|14d#18lac.txt | | | 7e−06 repeat AL683884.4\| | 0.0 BF411674 | 3e−08 AL683884.4\| |
| 31_3_15#1_Lac.txt | fkbp8 | 19p12 | 0.001 | 7e−4 AW935927 | 5e−86 AC068650 |
| 31_3_15#1_rE.txt | fkbp8 | 19p12 | 3e−34 repeat AC090529.2\| | 5e−36 AI715684 | 2e−36 AC096171.2\| |
| 31_3_17_Lac.txt | | | 4e−06 | 5e−05 | 1e−24 |
| 31_3_17_rE.txt | | | 4e−06 | 5e−05 | 2e−24 |
| 31_3_19#2_Lac.txt | | | 0.004 | 0.70 | e−161 |
| 31_3_19#2_rE.txtc | lectin-related protein C | | 8e−72 | 6e−76 | |
| 31_3_4_rE.txt | | | 0.016 | 0.013 | 8e−05 |
| 31_3_5_rE.txt | znf207 | 17q11.2 | 9e−07 | 1e−54 | 0 |
| 31_3_6_2_Lac.txt | FKBP8 | | 1e−30 CNS00002 | 0.64 | 2e−82 AC107272.2\| |
| 31_3_6_2_rE.txt | | | 3e−34 AC090529.2\| | 6e−35 AI715684 | 1e−40 AC108331.2\| |
| 31_3_9_rE.txt | mail | 3q12.3 | 1e−92 030612.1\| | e−113 AA798638 | 0.0 AC111450.1\| |
| 31_4_2_Lac.txt | | | H | none | H |
| 31_4_2_Laca.txt | | 22 q12.2 | H | 6e−4 BF389250 | 1e−89 AC095192.2\| |
| 31_4_2_LacO.txt | | | H | none | H |
| 31_4_2_rE.txt | | | 0.27 | none | 0.33 |
| 31_4_4#1_Lac.txt | | | 4e−33 AK018434 | 0.0 AI482382 | 0.0 AL135899 |
| 31_4_4#1_rE.txt | prss11 | 10q25.3-q26.2 | 6e−14 AL583887 | 3e−12 BB192448 | 3e−50 AC087063.17\| |
| 31_4_5#1_LacO.txt | | 22 q12.1 | 0.054 | 0.17 | 0.0 AC095192.2\| |
| 31_4_5#1_rE.txt | | | 0.21 | 0.67 | 0.27 |
| 32_3_2#1E-Lac.txt | | | H | 0.73 | 0.0 AC105839.1\| |
| 32_3_2#1E_rE.txt | CAM2 | | H | 8e−13 AI021238 | 0.30 |
| 34X23_1-rE.txt | card4 | 7p15-p14 | 0.004 AC006027.2\| | .003\|BF509588 | 5.8 |
| 34X23_3-rE.txt | Abcb1b | 7q21.1 | 1e−91 AJ312410.1\|RNO312410 | none | 2e−91 AC094362.2\| |
| 34X24_126-rE.txt | MAP3K7IP1 | 22q13.1 | 2e−20 AC000039 | 6e−14 BG717658 | 0.083 |
| 34X25_23_Lac.txt | | | 0.066 | 0.21 | 2e−08 AC094592.2\| |
| 34X25_23_rE.txt | PDE4B | 1p31.2-32.1 | 9e−17 AL109926.9\|HSDJ543C6 | .20 | 0.0 AC094592.2\| |
| 34x25_5a_rE.txt | | | 5e−40 repeat K00500.1\|RATRSSID | 1e−18 BE122674 | 3e−45 AC095096.3\| |
| 36_5_1_4_rE.txt | | | 5e−05 AF267747 | 2e−04 BF950374 | 8e−23 AL663067.7\| |
| 36_5_2_196-rE.txt | | | 3e−4 AC098729.3\| | 8e−4 AI552849 | 2e−08 AC116254.1\| |
| 36_5_2_19a_LacO.txt | | | 2e−29 repeat AC091503.2\| | 1e−30 BI292332 | 2e−33 repeat AC099104.2\| |
| 36_5_2_19b_LacO.txt | | | 8e−10 repeat AL592303.15\| | 4e−04 AI552849 | 2e−13 AC094419.2\| |
| 36_5_2_6-rE.txt | brd2 | 6p21.3 | 4e−64 AF100956 | 5e−17 | e−135 AC098547.2\| |
| 36_5_2_6_LacO.txt | RD2 | | | e−126 AF100956 | 2e−29 BI653651 7e−21 |
| | | | | | AL671924.2\| |
| 36_7_1_a_rE.txt | | | H | none | H |
| 38_17#2_rE.txt | SCMH1 | 1p34 | 5e−12 AK009416 | 0.054 | 0.0 AC109561.2\| |
| 39_2_6-Lac.txt | | | 4e−92 | repeat AL645968.6\| | 8e−84 BI289726 |
| 39_2_6-rE-repMa.txt | | | H | none | H |
| 39_2_6-rE.txt | | | 6e−45 AL591207.15\| | 2e−38 repeat BI290754 | 3e−53 repeat |
| | | | | | AC097552.3\| |
| 3_2_13_rE.txt | s100A6 | 1q21 | 5e−12 repeat AC025910 | 8e−60 AA267952 | 2e−73 AC027648.11\| |
| 3_2_4_rE.txt | s100A6 negative strand | 1q21 | 5e−21 repeat in L47235.1\|MUSXPDG1 | 3e−13 BF566181 | 7e−55 AC027648.11\| |
| 3_6_9_teoG_rE.txt | | | 0.28 | none | 0.35 |
| 42_8#3_rE.txt | arhgef3 | 3p21-p13 | 5e−49 AK016751 | e−49 BB642560 | 0.0 AC108271.2\| |
| 49_RA2_A_rE.txt | hnrpl | 19q13.2 | 0.0 AC008982 | 4e−20\|BG941347 | 4e−24 repeat AC069503.21\| |
| 4ae5_rE.txt | ms4a48b | 11q13.1 | 0.047 | none | 0.0 AC097387.3\| |
| 4a_b4.txt | | | 0.011 | 0.14 | 9e−04 |
| 4cx_b4.txt | | | H | none | H |
| 4c_lac.txt | | | H | none | |
| 4c_rE.txt | | | 0.002 | none | 0.14 |
| 5ad4-rE.txt | | | H | none | H |
| 5ASE_Lac.txt | | | 3e−12 repeat AF260927 | 5e−10 BG071839 | 0.0 repeat |
| | | | | | AC110948.2\| |
| 5a_b4.txt | | | H | none | H |
| 5a_lac.txt | | | 0.033 | 6e−15 BF396599 | 0.0 repeat |
| | | | | | AC112381.1\| |
| 5a_rE.txt | | | H | none | H |
| 5_1_LacO.txt | | | H | none | H |
| 5_1_LacO.txt | LOC161391 | 14q24.3 | 5e−18 repeat AC112870.1\| | 4e−21 BE650278 nonrepeat | 2e−21 |
| 6ae_T7.txt | | | 2e−24 RATSIB2513 satellite | 8e−23 BE122674 | 1e−28 AC095863.2\| |
| 6aso1_rE.txt | | | H | none | H |
| 6B37H_T7.txt | anx1 | 9q 12-q21.2 | e−152 U25159.1\|RNU25159 | 0.29 | 0.0 AC106671.1\| |
| 6B52E_rE.txt | LOC94765 [fer1I3-] | 10q23.32 | 8e−04 | 0.011 | e−162 AC105467.3\| |
| 6B52_Lac.txt | | | H | none | 2e−05 |
| 6b60_Lac.txt | TPM1 | 15q22.1 | 0.0 | 5e−05 | 0.0 |
| 6BE1_Lac.txt | | | 0.0 | 0.0 | 0.0 |
| 6BE1_rE.txt | | | 8e−75 RNPBUS19 | 1e−73 BE104253 | 0.0 AC107332.2\| |
| 6BE3_lac.txt | | | 4e−18 repeat RNSAT1 | 1e−39 | e−126 AC098526.5\| |
| 6be3_rE.txt | atp6c L or C | −16p13.3 | 4e−57 AF356008 | e−142 AI045498 | 0.67 |
| 6be5_rE.txt | BAB24609 FLJ23468 | 4q35.1 | 3e−31 AK006479 | 2e−31 BI107987 | 3e−22 AC117951.1\| |
| 6BE60_rE.txt | tpm1 | 15q22.1 | e−106 M15473.1\|RATTMA4 | 4e−98 BF523256 | e−141 |
| 6BE65_T7.txt | abcr [likely PARG1] | 1p22.1-p21 | 4e−64 NM_007378.1\| | 0.16 | AC095434.2\|/human AC079328.7\| |
| | | | | | 0.0 AC096978.3\| and |
| | | | | | human AC105278.1\| |
| 6BE72_Lac.txt | na | | H | none | 7e−05 AC080168 |
| 6BE72_rE.txt | CTCF | 16q21-q22.3 | 1e−05 BC009129 | 8e−22 AI071481 | none |
| 6bh15_T3.txt (188-end-vector)first 188 | 2e−60 tma3 | 15q22.1 | M16433.1\|RATTMA3 | 1e−14 av681483 RATTMA3 | 4e−61 AC095434.2\| |
| 6BSA#12_T3.txt | ADAM10 | 15q21.3-q2 | 2e−17 repeat | 1e−17 repeat AV681528 | 1e−09 repeat |
| | | | | | AC007412 |
| 6BSA12_B4.txt | na | | H | na | none H |
| 6BSA12_rE.txt | ADAM10 | 15q21.3-q2 | H | 0.72 | 3e−53 AC093406.1\| |
| 6_3_6_2B_B4.txt | na | | H | none | H |
| 6_3_6_2E-rE.txt | loc169647 | 9q34.13 | 1e−08 022596.1\| | 6e−32 BF556068 | 5e−83 AC068494.11\| |
| 6_3_6_2E_Lac.txt | na | | 2e−32 satellite S64624 | 2e−16 BE122674 | 1e−74 AC068494.11\| |
| 70A-rE.txt | ANXA3 | 4q13-q22 | H | none | 0.0 AC111410.1\| |
| 70A_Lac.txt | na | | 0.007 | 0.51 | 0.0 AC111410.1\| |
| 7A10_1-Lac.txt | na | | 2e−04 repeat RNU77636 | 2e−04 BI301327 | −09 AC112322.1\| |
| 7A10_1_rE.txt | protein | 3p24 | 0.22 | 0.69 | 4e−31 AC073741 |
| 7A7′_Lac.txt | anx12 | 15q21-q22 | 3e−64 AC000399 | .026 BE892019 | 4e−05 AC019146 |
| 7A7′_rE.txt | LOC145817(ANXA2) overlap by FLJ11896 | 15821.3 | 2e−97 AC000399 | 0.045 | 0.072 |
| 8C5_11-rE.txt | | | H | 1.31 | H |
| 8C5_11_Lac.txt | | | H | none | H |
| 8C5_6-Lac.txt | | | H | 0.16 | 0.0 AC097795.2\| |
| 8C5_6_rE.txt | NPEPPS | 17q21 | 13-15 ACO25682 6\| | 0.18 | 0.0 AC097795.2\| |
| 9A#2_3_Lac.txt | na | na | none | 3e−69 AC094412.2\| | |
| 9A#2_3_rE.txt | MGC20647 | 22q12.1 | 0.23 | na | 2e−14 AL731658.9\| |
| 9B27_2_rE.txt | hsj1[2] negative strand | 9p13-p12 | 2e−32 RNU53922 | 1e−30 BB606068 | 2e−11 AC107815.1\| |
| B10_3b_2_3Lac.txt | jwa negative stand | 3p14 | H | none | H |
| L11#17_rE.txt | na | | 1e−6 AL671916.4\| | 8e−07 BF455987 | e−162 AC111476.1\| |
| L11X#17_Lac.txt | na | | 0.003 | 0.17 | 1e−06 AC107099.2\| |
| L12cx#11_Lac.txt | na | | H | none | H |
| L12cx#11_rE.txt | na | | 9e−30 | none | H |
| L14D#18_Lac.txt | na | | 5e−18 | 1e−08 | 1e−15 |
| L14D#8_Lac.txt | na | | 0.016 | | none |
| L14XD#18_rE.txt | na | | H | none | H |
| L14XD#2-rE.txt | na | | H | none | H |
| L14XD#2_Lac.txt | na | | H | none | H |
| L14XD#8_rE.txt | na | | H | none | 0.30 |
| L14XD12E_rN80.txt | na | | 2e−51 | 0.18 | 2e−05 |
| L14_7_2B_B2.txt | na | | 6e−11 | 1e−08 | 2e−17 |
| L14_7_2B_B4.txt | na | | H | none | H |
| L1739E_rE.txt | na | | 0.22 | none | 0.070 |
| L191B2E#1_Lac.txt | na | | e−139 | none | 0.063 |
| L191B2E#1_RE.txt | rpa16 | 7p22 | e−117 | | H |
| L191B2E#3+_rE.txt | na | | 9e−07 | 7e−04 | 0.0 |
| L192A3E_Lac.txt | na | | H | none | H |
| L192A3E_rE.txt | fer1\|3 | | 0.20 | 0.62 | e−167 |
| L192B3E#13_rE.txt | m6p/igf2r | 6q26 | 2e−60 | none | 1e−55 |
| L193A1E#A_Lac.txt | na | | 3e−16 | none | 4e−16 |
| L193A1E#A_rE.txt | na 3e−06 | | e−157 | | |
| L194c4E_rE.txt | na | | H | none | 8e−08 |
| L195B1E_Lac.txt | na | | H | 1e−54 | e−132 |
| L195B1E_rE.txt | gtf2e1 | | 0.63 | 5e−41 | 0.0 |
| L195C5E-rE | CL2-like 1 | | 20q11.21 | 3e−16 | 3e−13 3e−13 |
| L197B3E-rE | na | | 2e−11 | na | 0.0 |
| L197B3E-rE.txt | na | | H | none | e−119 |
| L197B3E_Lac.txt | na | | 4e−06 | 3e−06 | e−146 |
| L19D16E-rE | na | | 0.004 | na | 4e−37 |
| L21C1E_Lac.txt | na | | H | none | 0.24 |
| L21_5_7#2_Lac.txt | na | | 3e−06 | </PRE> | 9e−10 |
| L22_5A1_Lac.txt | na | | 0.064 | </PRE> | 0.080 |
| L22_5A1_rE.txt | na | | 0.063 | none | 0.31 |
| L24_10_1BE_rE.txt | na | | H BF525273 | 0.19 | 9e−48 |
| L24_26_10-Lac.txt | na | | e−144 | 1e−11 | H |
| L24_26_10-rE.txt | loc168348 | | e−168 | e−134 | 0.27 |
| L24_26_1_B4.txt | na | | H | none | H |
| L24_26_1_BL-re.txt | na | | e−103 | 4e−24 | 3e−35 |
| L24_26_2A-rE.txt | na | | 0.22 | </PRE> | 0.27 |
| L24_26_2B-Lac.txt | na | | e−164 | 7e−33 | 0.0 |
| L24_26_2B-rE.txt | na | | e−178 | 8e−33 | |
| L24_3_2B_rE.txt | na | | 0.26 | none | 0.32 |
| L24_4_2-Lac.txt | na | | 1e−05 | 0.054 | e−107 |
| L24_4_2-rE.txt | na | | 0.066 | 0.052 | |
| L24_4_2AE_rE.txt | na | | 0.066 | 0.052 | 0.0 |
| L24_4_2BE_rE.txt | dlx2 negative | 2q32 | 2e−23 | none | 2e−92 |
| L24_4_3-Lac.txt | na | | e−170 | 2e−91 | e−167 |
| L24_4_3-rE.txt | kiaa0255 | | 4e−71 AC078911 | 3e−43 plamsid | 4e−47 plasmid |
| | | | | | contamination AC006099 |
| L24_5_2-Lac.txt | na | | 1e−37 | 1e−30 | 5e−40 |
| L24_5_2-rE.txt | na | | 0.26 | none | 0.33 |
| L24_5_2BE_rE.txt | HNF3B | 20p11 | 0.004 | 0.013 | 0.0 AC113866.2\| |
| L24_5_3BE_rE.txt | kiaa0255- | | e−125 AC078911.11\| | 3e−06 | 6e−06 |
| L24_5_3_rE.txt | KIAA0255- | 20q11.21 | e−125 AC078911.11\| | na | 3e−06 6e−06 |
| L24_6_3-Lac.txt | na | | 0.067 | 0.22 | 0.0 |
| L24_9_1-Lac.txt | na | | 0.27 | none | 8e−67 |
| L24_9_1_rE.txt | na | | 9e−23 | 7e−23 | 1e−25 |
| L25_10-Lac.txt | s100a6 | | 5e−21 | 2e−13 | e−110 |
| L28AP-rE.txt | TCEB3 | | 1p36.1 | 0.43 | 0.40 e−102 |
| AL672076.2\| | | | | | |
| RA2#C_Lac.txt | na | | 7e−66 | 0.0 | |
| RA2#C_Laco.txt | na | | 0.0 | 4e−06 | 0.0 |
| RA2#C_rE.txt | na | | 0.069 | e−119 | 0.0 |
| RA3_A_rE.txt | dj3240 | 17.1.2 | 0.0 | 0.72 | 0.0 |
| RA5_A_rE.txt | na | | 1e−51 | 0.17 | |
| RA5_B_rE.txt | gamma crystalline | | 0.0 | 0.003 | 0.0 |
| SCA6#1_Lac.txt | loc131020 | | 0.25 | e−102 BF289981 | 6e−64 AC103936.2\| |
| SCA6#1_rE.txt | LOC151593 | 3q24 | H | 0.68 | 3e−44 AC103936.2\| |
| SCA7#5-Lac.txt | na | | H | none | H |
| SCA7#5_rE.txt | | | H | none | |
| SCA9#14_Lac.txt | na | | 6e−45 | 0.003 | 7e−05 |
| SCA9#14_rE.txt | 7e−23 | | 6e−20 | 5e−55 | |
| ScB2#19_Lac.txt | erbin | | 2e−07 | 4e−09 | |
| ScB2#19_rE.txt | ERBB2IP | 5q13.1 | H 1e−27 | H | |
| second est of incyte for 6_3_6_{—} | na | 0.0 | na | 0.0 | e−149 |
| seq1a_lac.txt | na 7e−80 | 3e−83 | | | |
| seq1b_lac.txt | znf7 (KOX4) | 8q24 | 0.46 | 0.092 | 0.14 |
| sequence match for 34X23_1.txt | CAR (RFP2) | 13q14 | 0.0 | na | 0.0 0.0 |
| X11_rE.txt | na | | e−178 | 8e−84 | 1e−18 |
| x13_rE.txt | na | | H | none | 4e−48 |
| x15_rE.txt | fksg28 | 10q24.2 | H | none | |
| x18 estAI647623.txt | kiaa1303 | 17q25.3 | e−167 | e−121 | e−149 |
| X18H_t7.txt | kiaa1303 | | 2e−10 | 2e−10 | 0.0 |
| X20_rE.txt | nicer element | | e−104 | e−103 | e−143 |
| X236E1_T3.txt | na | | 0.018 | 0.23 | |
| X236E1_T7.txt | na | | 0.013 | none | e−116 |
| X23_7-T3-clean.txt | na | | H | H | |
| X23_7-T3-intact.txt | na | | 4e−18 | 1e−11 | 0.001 |
| X23_7_T7.txt | na | | H | none | H |
| X23_8-T3.txt | na | | H </PRE> | 0.066 | |
| X24_4_T7.txt | na | | H | none | H |
| x27b4f_1.txt | na | | 0.38 | 0.48 | |
| x2_b4.txt | na | | H | none | 0.16 |
| X3_2_13_Lac.txt | s100a6 | | 5e−15 | 1e−12 | 2e−15 |
| X3_2_4_LacO.txts100a6- | wrong direction | | 7e−76 | 7e−60 | 6e−83 |
| X4_rE.txt | na | | H | 1.31 | H |
| x5_rE.txt | na | | H | none | 2e−34 AC110459.2\| |
| X7B-B4.txt | na | | H | 1.31 | H |
| EST extensions or est match blasts results; | | | | | |
| 0542234 est of 14a13e_re.txt | gata4 | 8p23.1-p22 | H | none | 8e−16 AC069185.6h |
| EST 10_3b_2_rE.txt | 2e−70 | | 0.0 | 1e−43 | |
| est 5ase-lacAA946172.txt | | | 0.002 | 5e−62 | 0.0 |
| est for 10_4b_4_rE.txt | | | 0.69 | 0.0 | H |
| est for scb2#19.txt | 2e−76 | | e−151 | 1e−53 | |
| est From 12 4b_9re.txt | | | 0.0 | 0.0 | 3e−48 |
| est from 12c#A-re-AA972262. | e−116 | | e−143 | 6e−86 | |
| est from 12_3B#8_RE.txt | APTX | 9p13.3 | 0.0 | aa871174 | 0.0 1e−07 |
| EST from L193A1E#A_rE-AI230550. | | | 3e−04 | 0.0 | 0.0 |
| est of 42_8#3_rE.txt | | | 0.0 | 0.0 | 5e−77 |
| est of 31_3_9_lac.txt | | | 0.0 | 0.0 | 0.0 |
| est of 32_3_2#1E_rE.txt | | | 0.10 | 0.33 | |
| est of 36_5_2_19b_lac.txt | | | 2e−44 | 0.0 | 1e−64 |
| est of 6_3_6_2E-rEa.txt | LOC169647 | 9q34.13 | 0.0 | 0.0 | e−166 |
| est of L195B1E-lac.txt | GTF2E1 | 3q21-q24 | 1e−08 | 0.0 | 0.0 |
| est of RA2#C_rE.txt | | | 0.34 | e−106 BE089756 | e−124 |
| est of sca6#1.txt | | | e−166 | | |
| Est-31-3-9 incyte1056987-1.txt | | | 2e−92 | | |
| est-36_5_2_196-rE AI552849.txt | | | na | 0.0 | 2e−63 |
| est-L24_5_3BE_rE.txt | | | 1e−19 | 0.0 | 0.0 |
| est191e9b-rb2-124.txt | id3 | | 2e−20 | 2e−16 | 2e−23 |
| EST224186 of x18.txt | e−121 | | e−149 | | |
| est_L24_5_3BE_rEa.txt | TUSP | 6q25-q26 | 0.0 | 0.0 | 0.0 |
| extension of est-L195B1E_rE.txt | GTF2e1 | | 6e−08 | 0.0 | 0.0 |
| gene of 12_3b#8.txt | APTX | 9p13.3 | 0.0 | 0.0 | 0.003 |
| incyte cDNA for 24-26-10-human. | na | | 0.0 | e−170 | 1e−06 |
| incyte est of 6_3_6_2E-rEa est | na | | e−160 | 0.0 | 5e−61 |

TABLE 2

| | SEQ_NAME | SEQ_NOTES |
|---|---|---|
| 1 | 10_2A_3_12-rE | GATA4: GATA binding protein 4 human chromosome 8 10,812K-12,275K |
| 2 | 10_3A_2_Lac | Ppm1a: protein phosphatase 1A, magnesium dependent, alpha isoform murine chromosome 12 67,344K-67,458K |
| 3 | 10_3bE gene- | Hp1bp3 heterochromatin protein 1 binding protein 3, 1p36.12 HP1-BP74 |
| | F113534 | |
| 4 | 10_3b_2_rE | LOC239743 similar to kelch-like 6 (Drosophila) [Homo sapiens] murine chromosome 16 A3 |
| 6 | 10_46_4-Lac | aprataxin 5 prime of DnaJ Hsp40 homolog, subfamily A, member 1 |
| 7 | 10_4A_8_rE | gas5 murine chr 1 |
| 8 | 10_4b_4_rE | sits at end of LOC287974 in negative strand - positive strand - upstream maybeB3gnt5 1599 bp mRNA |
| | | linear ROD 28-JAN-2003 DEFINITION Rattus norvegicus UDP-GlcNAc:betaGal beta-1, |
| | | 3-N-acetylglucosaminyltransferase 5 (B3gnt5), mRNA. |
| 9 | 12C#A_rE | kiaa0750 human chr 11 |
| 10 | 12CX#11E_rE | LOC330280 or Psma3 is listed as being only 853 nts, which seems unlikely murine chromosome 6 |
| 11 | 14A7re | Madh7 MAD homolog 7 (Drosophila)at 18p12 human chr 18 46,230K-46,308K |
| 12 | 12CX#6_rE | Rattus norvegicus similar to gonadotropin inducible ovarian transcription factor 1 |
| 13 | 12CXY#7_rE | HTRA, PRSS11 murine chromosome 7 119,771K-119,793K, human chromosome 10q25.3-q26.2 |
| 14 | 12C_2B#9E_rE | LOC244819 murine chr 9 993161 . . . 1003851 + 99 20888725 |
| 15 | 12PSA#6_rE | ref: NP_003741.1 - eukaryotic translation initiation factor 3, subunit 10 (theta, 150/170 kD); eukaryotic |
| | | murine chr 19 21363609 . . . 21370345 − 448 6753740 Eif3 eukaryotic translation initiation factor 3 |
| 16 | 12_3B#10-rE | LOC241690, mouse 5 of rin2 - which is likely gene mRNA complement(join(45074453 . . . 45074634, |
| | | 45082032 . . . 45082055, 45083667 . . . 45083839, 45100942 . . . 45101235, 45140102 . . . 45140163)) |
| | | LOC241690/product = similar to ribosomal protein L10 [Rattus norvegicus]/transcript_id = XM_141402.1 |
| 17 | 12_3B#2_Lac | Arl6ip5 |
| 18 | 12_3B#2_rE | positive strand chr 4 rat is: ubiquitin - activating enzyme E1C Ubelc and on the other side, similar to |
| | | Neuronal tropomodulin (N-Tmod) (Tropomodulin 2) LOC312585 negative strand.glutamate transporter EAAC1 |
| | | interacting protein negative strand. |
| 19 | 12_3B#8_rE | aprataxin, murine chr 4 - this gene is off negative strand, and there may be another rat gene |
| 20 | 12_4B#7-rE | Peptidyl-prolyl cis-trans isomerase A (PPIase) (Rotamase) (Cyclophilin A) (Cyclosporin A-binding protein) |
| 21 | 12_4b#11_rE | NT_039230. Mm3_39270_30 Mus musculus chromosome 3 genomic contig no gene identified in this murine |
| | | sequence |
| 22 | 12_4b_9_rE | LOC211313 NT_039299.1\|Mm5_39339_30 Mus musculus chromosome 5 genomic |
| 23 | 12_6B#6_rE | |
| 24 | 12_L24_5_3-Lac | murine chr 2 closest murine gene is 1723887 . . . 1724855 − 323 20340819 LOC241732 TSPY which is probably |
| | | not the gene |
| 25 | 14A13E_rE | 0542234 est of 14a13e_re murine chr 14 52M-55M next to gata 4 |
| 26 | 14A14E_rE | |
| 27 | 14C_2E_rE | srp19 human chr 5 murine 18 |
| 28 | 14G3E_rE | |
| 29 | 14H1E_rE | |
| 30 | 14H4E_rE | |
| 31 | 14XD#12E_rE | CLR-B murine chromosome 6 |
| 32 | 14XD#18B_B4 | |
| 33 | 14_24_#6-rE | region of ferl13 human chr 10 |
| 34 | 14_7#2E_rE | Mm11_39560_30 Mus musculus chromosome 11 genomic, mgat-1 |
| 35 | 17_3_3He_1-T7 | murine chr 11 E130113K08Rik |
| 36 | 18A_8_1E_rE | 18992349 . . . 19034645 + 126 21312102 1110029A09Rik murine chr 4 |
| 37 | 18A_8_3E_rE | 1469944 . . . 1479193 − 91 20840505 E130102H24Rik murine chr 4 |
| 38 | 18_5#13E_rE | |
| 40 | 191E2E_rE | |
| 41 | 191E8E_rE | 22749957 . . . 22802881 − 337 20877992 LOC239186 closest match murine chr 14 |
| 42 | 191E9E_rN80 | CLR-C 4448981 . . . 4475825 + 202 28526608 LOC333160 this is C lectin-related protein C murine chr 9 |
| 43 | 19D3E_rE | 6982588 . . . 6999715 + 162 28523464 LOC333094 murine chr 6 |
| 44 | 19D5E_rE | Pts 6-pyruvoyl-tetrahydropterin synthase |
| 45 | 19_7AE_rE | |
| 46 | 19_9BE_rE | Cstf2: cleavage stimulation factor chr X mouse and man |
| 47 | 1a_rE | |
| 48 | 1bw_lac | LOC195700 closest gene murine chr 6 294812 . . . 337018 + 438 28523444 |
| 49 | 20_L28AP-Lac | loc279232 murine chr 4 |
| 50 | 21_5_8E(2)_rE | E2F-2, murine chr 4 5700649 . . . 5721013 + 444 28498372 LOC242705 |
| 51 | 24_3_5#1_rE | murine chr 11 similar to Collagen alpha1 closest known gene LOC217123 |
| 52 | 29A_5_1_Lac | s100a6 murine chr 3 lac sequence in s100a5 |
| 53 | 2AE_lac | JNK-binding protein JNKBP1 like murine chr 2 8031390 . . . 8107228 − 343 28484974 LOC241298 |
| 54 | 2b_lac | 2281090 . . . 2321346 + 162 28485837 LOC329423 murine chr 2 next to dlx1 and 2 |
| 55 | 31_3_15#1_Lac | murine chr 8 within gene 8031390 . . . 8107228 − 343 28484974 LOC241298 off negative strand and |
| | | probably disrupts 5790690 . . . 5796087 + 356 6857787 Fkbp8 |
| 56 | 31_3_17_rE | cut-like 1 (cutl1) 6647971 . . . 6737110 − 1332 7106283 Cutl1 CCAAT displacement protein murine chr 5 |
| 57 | 31_3_19#2_rE | 4637984 . . . 4643986 + 208 16716407 Ocil-pending C lectin-related protein B murine chr 6 |
| 58 | 31_3_5_rE | murine chr 11 38818453 . . . 38830549 + 461 6756051 Zfp207 Zfp207 |
| 59 | 31_3_6_2_Lac | murine chr 12 is equivalent to hu 14 in non-repetitive part 7737091 . . . 7806367 + 128 20849473 |
| | | LOC217541 similar to 3-phosphoglycerate dehydrogenase |
| 60 | 31_3_9_rE | 53077725 . . . 53087552 − 729 13447398 Mail-pending definite murine chr 16 |
| 61 | 31_4_2_rE | 7424 . . . 39696 − 679 28505866 2310047I15Rik murine chr 11 |
| 62 | 31_4_4#1_rE | 755214 . . . 804073 + 481 9625027 Prss11 murine chr 7 |
| 63 | 32_3_2#1E_rE | 21171379 . . . 21180079 − 149 6680832 Calm2 calmodulin 2 murine chr 17 |
| 64 | 34X23_1-rE | murine chr 12 closest gene is 9807175 . . . 9807651 + 159 20849986 LOC238153 |
| 65 | 34X23_3-rE | two genes in opposite orientations - probably share a promoter region 1999682 . . . 2066949 − |
| | | 1277 6755046 Abcb1b ATP-binding cassette, sub-family B (MDR/TAP), member 1B 2067489 . . . 2075793 + 142 |
| | | 28501108 LOC330031 vector disrupts loc33031 murine chromosome 5 |
| 66 | 34X24_126-rE | 41543381 . . . 41569827 + 503 28486603 2310012M03Rik Similar to mitogen-activated protein kinase |
| | | kinase kinase 7 interacting protein 1 TAK1 murine chr 15 |
| 67 | 34X25_23_Lac | 2377737 . . . 2727820 + 722 9790151 Pde4b phosphodiesterase 4B, cAMP specific murine chr 4 |
| | | 2377737 . . . 2727820 + 722 9790151 Pde4b phosphodiesterase 4B, cAMP specific |
| 68 | 34X25_23_rE | murine chr 4 2377737 . . . 2727820 + 722 9790151 Pde4b |
| 69 | 34x25_5a_rE | |
| 70 | 36_5_2_196-rE | |
| 71 | 36_5_2_6-rE | murine chr 17 LOC309624 |
| 72 | 36_7_1_a_rE | |
| 73 | 38_17#2_rE | 20744318 . . . 20811497 + 665 22095027 Scmh1 sex comb on midleg homolog 1 murine chr 4 |
| 74 | 39_2_6-rE | |
| 75 | 4a_b4 | murine chr 5 |
| 76 | 3_2_13_rE | s100a6 murine chr 3 |
| 77 | 3_2_4_rE | s100a6 murine chr 3 |
| 78 | 42_8#3_rE | murine chr 14 657807 . . . 709478 + 1499 28477705 4933409E02Rik which is retinoblastoma-associated |
| | | protein RAP140 |
| 79 | 4ae5_rE | 19q13.13 |
| 80 | 4c_rE | |
| 81 | 4cx_b4 | murine chr 1 |
| 82 | 5_1_Lac0 | 32168807 . . . 32227960 − 625 28521737 LOC238331 murine chr 12 there is a repeat, but not in the first |
| | | part of the sequence that matches this |
| 83 | 5a_lac | two ests - perhaps on rat chr 4 gi\|20423079\|gb\|BQ206614.1\|BQ206614 gi\|11381574\|gb\|BF396599.1\|BF396599 |
| 84 | 6B37H_T7 | 10964157 . . . 10975247 − 347 6754570 Anxal murine chr 19 |
| 85 | 6B52E_rE | 4257489 . . . 4269990 − 151 28551828 E030042N20Rik 4330462 . . . 4335374 + 190 20888893 1200008O12Rik |
| | | murine chr 19 |
| 86 | 6BE1_Re | R. norvegicus mRNA (pBUS19) highly repetitive sequence of retroviral origin |
| 87 | 6BE3_lac | 697470 . . . 702328 − 156 6753144 Atp6v0c murine chr 17 |
| 88 | 6BE60_rE | tpm1, murine chr. 9 |
| 89 | 6BE65_T7 | 8533246 . . . 8538206 + 218 20875728 LOC242198 8546745 . . . 8685908 + 2269 6671495 Abca4 murine chr 3 t7 |
| | | sequence is in abca4 but collaborator could not find expression in rie-1 cells |
| 90 | 6BE72_rE | CTCF, chr 19-rat |
| 91 | 6BSA12_rE | adam10 and LIPH Gene map locus 15q21-q23 |
| 92 | 6_3_6_2E-rE | golgi matrix protein GM130 and Mnbk-Dyrk1A-binds to grb2 human gene is GG95 |
| 93 | 6be3_rE | chr 17 697470 . . . 702328 − 156 6753144 Atp6v0c |
| 94 | 6be5_rE | 2849866 . . . 2876267 + 411 20863400 LOC330758 murine chr 8 Similar to serine/threonine |
| | | protein kinase TAO1 |
| 95 | 6bh15_T3 | 13360838 . . . 13381657 − 285 13270471 Tpm1 tropomyosin 1, alpha murine chr 9 |
| 96 | 70A-rE | murine chr 5 anxa3 |
| 97 | 7A10_1_rE | LOC269872 Mus musculus chromosome 7 genomic contig, strain C57BL 6J − 618181 . . . 664133 |
| 98 | 8C5_11-rE | |
| 99 | 8C5_6_rE | murine chr 11 8625545 . . . 8698887 − 921 6679491 Psa puromycin-sensitive aminopeptidase |
| 100 | 9A#2_3_rE | LOC289895: similar to Emu1 protein rat 14 Emu1 is restricted to epithelial extracellular binding |
| 101 | 9B27_2_rE | murine chr 4 17656746 . . . 17665179 − 277 27228977 Aptx aprataxin sits at start of dnaj1a |
| 102 | L11#17_rE | |
| 103 | L12cx#11_rE | closest to 276400 . . . 276777 − 126 28523321 LOC330280 in region of AAC12943 3037091 proteasome |
| | | alpha7/C8 subunit [Mus musculus] |
| 104 | L14D#18_Lac | |
| 105 | L14D#8_Lac | murine chr 16 negative strand between these two genes 42060678 . . . 42085522 + 206 21312810 4833409J19Rik |
| | | RIKEN cDNA 4833409J19 42212422 . . . 42245696 + 950 23956172 Ssg1-pending |
| 106 | L14XD#18_rE | Gtpat12 |
| 107 | L14XD#2-rE | |
| 108 | L14XD#8_rE | murine chr 16 |
| 109 | L14XD12E_rN80 | 4448981 . . . 4475825 + 202 28526608 C lectin-related protein C LOC333160 murine chr 6 |
| 110 | L1739E_rE | R74726 murine chr 9 |
| 111 | L191B2E#1_Lac | 1224295 . . . 1225537 + 134 6677791 Rpol-3 murine chr 5 |
| 112 | L191B2E#1_RE | |
| 113 | L191B2E#3+_rE | 64583664 . . . 64585839 + 305 20343300 LOC239678 although this gene appears to be on the negative |
| | | strand murine chr 15 closest postive strand gene is HOXC13 |
| 114 | L192A3E_rE | in between E030042N20Rik: RIKEN cDNA E030042N20 gene and 1200008O12Rik: RIKEN cDNA 1200008O12 |
| | | gene murine chr 19 4257489 . . . 4269990 − 151 28551828 E030042N20Rik fer-1 like protein 3 |
| | | 4330462 . . . 4335374 + 190 20888893 1200008O12Rik |
| 115 | L192B3E#13_rE | 5058584 . . . 5144689 − 2483 23956054 Igf2r murine chr 17 |
| 116 | L193A1E#A_rE | |
| 117 | L194c4E_rE | 34316683 . . . 34341462 − 441 21312660 Gtf2e1 general transcription factor II E, polypeptide 1 |
| | | (alpha subunit) murine chr 16 |
| 118 | L195B1E_rE | similar to E2IG2 murine chr 7 28480555 LOC244162 rat chr 1 LOC308858murine chr 7 |
| 119 | L197B3E-rE | 1287066 . . . 1334911 − 234 6753170 Bc121 murine chr 2 |
| 120 | L19D16E-rE | 6982588 . . . 6999715 + 162 28523464 LOC333094 murine chr 6 |
| 121 | L22_5A1_rE | murine chr 14 negative strand maybe similar to FSHD Region Gene 2 |
| 122 | L24_10_1BE_rE | loc276970 murine chr 11 Mm11_39561_30 |
| 123 | L24_26_10-rE | 276400 . . . 276777 − 126 28523321 LOC330280 murine chr 6 |
| 124 | L24_26_1_BL-re | repeat shows up on this |
| 125 | L24_26_2A-rE | murine chr 14 7931639 . . . 7932322 − 228 20881545 LOC212081 |
| 126 | L24_26_2B-rE | 36668143 . . . 36676666 + 254 28524792 LOC332305 murine chr 18 |
| 127 | L24_4_2AE_rE | |
| 128 | L24_4_2BE_rE | 2175918 . . . 2178442 + 256 6753644 Dlx1 distal-less homeobox 1 2190449 . . . 2192321 − 333 6753646 |
| | | Dlx2 distal-less homeobox 2 murine chr 2 |
| 129 | L24_4_3-rE | 12387618 . . . 12442029 + 1221 28500402 2810442I22Rik 12527560 . . . 12529296 + 579 7657112 Galnt4 |
| | | UDP-N-acetyl-alpha-D-galactosamine:polypeptide N-acetylgalactosaminyltransferase 4 12544567 . . . 12544764 − |
| | | 66 6679305 ??Phxr2 murine chr 10 |
| 130 | L24_5_2BE_rE | 47832456 . . . 47859226 + 295 20912679 LOC241708 murine chr 2 |
| 131 | L24_5_3BE_rE | 1570784 . . . 1576636 + 193 21704056 LOC228788 similar to chromosome 20 open reading |
| | | frame 160 1623748 . . . 1650722 + 504 6754166 Hck hemopoietic cell kinase 1686886 . . . 1691690 + 265 |
| | | 28488150 LOC329539 1701920 . . . 1708331 + 139 19527062 AU045326 expressed sequence |
| | | AU045326 1723887 . . . 1724855 − 323 20340819 LOC241732 murine chr 2 negative strand |
| 132 | L24_6_3-Lac | LOC304968 rat 13q23 similar to RIKEN cDNA 1700009P17 [Mus musculus] |
| 133 | L24_9_1-Lac | LOC230761 murine chr 4 |
| 134 | L24_9_1_rE | 12638955 . . . 12746974 − 450 28490830 Ddx10 Similar to DEAD/H murine chr 9 |
| 135 | L25_10-Lac | 26660256 . . . 26660811 + 90 25048430 S100a6 murine chr 3 |
| 136 | L28AP-rE | murine chr 4-missing the gene in between 8430427k15 and loc279232 |
| 137 | SCA6#1_rE | 5459137 . . . 5476774 − 425 28492548 LOC244982 murine chr 9 |
| 138 | SCA7#5-Lac | C lectin-related protein B |
| 139 | SCA9#14_rE | 12018184 . . . 12022411 − 161 16519535 Erbb2ip the erbb2ip is in the correct orientation for |
| | | this vector insert, the vector resides next to this gene-12120524 . . . 12120802 + 93 28526912 |
| | | LOC328330 in the wrong orientation murine chr 13 |
| 141 | X23_7_T7 | |
| 142 | X23_8-T3 | |
| 143 | X24_4_T7 | |
| 144 | seq1b_lac | murine chr 15 mgc6397, related to zinc finger 7 (human) |
| 145 | 7A7_rE | chr 9 anxa2 |
| 146 | est12c#A-re- | |
| | AA972262 | |
| 147 | est42_8#3_rE | rap140 retinoblastoma-associated Mm14_39638_30 Mus musculus chromosome 14 genomic contig, |
| | | strain C57BL/6 657807 . . . 709478 + 1499 28477705 4933409E02Rik similar to |
| | | RETINOBLASTOMA-ASSOCIATED PROTEIN RAP140 |
| 148 | ESTL193A1E#A_rE- | AI326792 and 1300010C19-RAGA (RAS-RELATED GTP-BINDING PROTEIN murine chr 4 |
| | AI230550. | |
| 150 | est32_3_2#1E_rE | murine chr 17 |
| 151 | est36_5_2_19b_lac | CCr4-NOT complex-transcription factor subunit murine chr 6 |
| 152 | estL195B1E-lac | chr 9 mouse next to loc244982 |
| 153 | extension_est- | anxa2 murine chr 9 |
| | L195B1E_rE | |
| 154 | 7a7_rE | A230053O16Rik murine chromosome 2, human chr 20 maybe |
| | | Bcl2l Unexpectedly, the smaller mRNA species (BCLXS) encodes a protein that |
| | | inhibits the ability of BCL2 to enhance the survival of growth factor-deprived cells. |
| | | In vivo, the smaller BCLX mRNA was expressed at high levels in cells that undergo a high |
| 155 | 36_5_1_4_rE | rate of turnover, such as developing lymphocytes. murine chr 2 |
| 156 | L195C5E-rE | 4637984 . . . 4643986 + 208 16716407 Ocil-pending C lectin-related protein B murine chr 6 |
| 157 | 24_9_3#2-re | |

[0158] Two of the sequences (Lab Designation 10_{—}2A_{—}3_{—}12-rE (SEQ ID NO: 17)) and Lab Designation 14A13E_rE (SEQ ID NO: 114)) isolated utilizing the methods of the present invention comprise sequence encoding GATA-Binding Protein 4 and map to human gene map locus 8p23.1-p22.

[0159] The GATA-binding proteins are a group of structurally related transcription factors that control gene expression and differentiation in a variety of cell types. Members of this family of DNA-binding proteins recognize a consensus sequence known as the ‘GATA’ motif, which is an important cis-element in the promoters of many genes. Arceci et al. (1993) cloned the mouse GATA4 cDNA by screening a 6,5-day embryonic library with primers based on the conserved zinc finger domains. The 50-kD predicted protein contains 2 zinc fingers and, when expressed in cell culture, activated appropriate reporter constructs. GATA 4 is associated with apoptosis, however, it was not previously known to be associated with any virus or with infection.

[0160] Another sequence (Lab Designation 10_{—}3A_{—}2_lac (SEQ ID NO: 213)) comprises sequence encoding PROTEIN PHOSPHATASE MAGNESIUM-DEPENDENT, 1A, ALPHA ISOFORM; PPM1A and maps to chromosome 14. This protein is also known as PROTEIN PHOSPHATASE 2C, ALPHA ISOFORM; PP2CA PP2C-ALPHA. Related to 2AE JNK-binding protein JNKBP1 like murine chr 2 8031390 . . . 8107228-343 28484974 LOC241298.

[0161] PPM1A is a serine/threonine protein phosphatase that is essential for regulating cellular stress responses in eukaryotes. By screening a human teratocarcinoma cDNA library with rat Pp2c-alpha as the probe, Mann et al. (1992) cloned the human counterpart, PPM1A, which they called PP2C-alpha. The PPM1A cDNA encodes a predicted 382-amino acid peptide that shares 99.7% amino acid identity with rabbit Pp2c-alpha.

[0162] In a genetic screen to identify protein phosphatases that negatively regulate the p38 (600289) and INK (see 601158) stress-activated MAPK cascades, Takekawa et al. (1998) obtained a PP2C-alpha cDNA, which they initially called MC4, that encodes a 324-amino acid peptide. The authors hypothesized that MC4 is an alternative splicing product of PP2C-alpha. The 2 proteins, which they termed PP2C-alpha-1 (382 amino acids) and PP2C-alpha-2 (324 amino acids), differ at the C terminus. Northern blot analysis detected 2.8- and 4,4-kb transcripts, which correspond to PP2C-alpha-1 and PP2C-alpha-2, respectively. Both transcripts were expressed at high levels in heart, placenta, skeletal muscle, and pancreas, and the 4,4-kb transcript (PP2C-alpha-2) was detected in brain.

[0163] Using immunohistochemical analysis, Das et al. (1996) detected PPM1A in both the cytoplasm and nucleus of mammalian cells, consistent with a role in dephosphorylating components of stress-activated pathways.

[0164] By expressing PPM1A in mammalian cells, Takekawa et al. (1998) demonstrated that PPM1A inhibits the activation of the stress-responsive p38 and JNK MAPK cascades. Their in vivo and in vitro observations indicated that PPM1A dephosphorylates and inactivates MAPKKs (MKK6 (601254) and SEK1 (601335)) and a MAPK (p38) in the stress-responsive MAPK cascades. Using coimmunoprecipitation assays, the authors demonstrated that PPM1A directly interacts with p38. MAPK (mitogen-activated protein kinase) cascades are common eukaryotic signaling modules that consist of a MAPK, a MAPK kinase (MAPKK) and a MAPKK kinase (MAPKKK) (Takekawa et al., 2Calpha inhibits the human stress-responsive p38 and JNK MAPK pathways EMBO J. 1998 Aug. 17; 17(16):4744-520) Because phosphorylation is essential for the activation of both MAPKKs and MAPKs, protein phosphatases are likely to be important regulators of signaling through MAPK cascades. To identify protein phosphatases that negatively regulate the stress-responsive p38 and JNK MAPK cascades, we screened human cDNA libraries for genes that down-regulated the yeast HOG1 MAPK pathway, which shares similarities with the p38 and JNK pathways, using a hyperactivating yeast mutant. In this screen, the human protein phosphatase type 2Calpha (PP2Calpha) was found to negatively regulate the HOG1 pathway in yeast. Moreover, when expressed in mammalian cells, PP2Calpha inhibited the activation of the p38 and JNK cascades induced by environmental stresses. Both in vivo and in vitro observations indicated that PP2Calpha dephosphorylated and inactivated MAPKKs (MKK6 and SEK1) and a MAPK (p38) in the stress-responsive MAPK cascades. Furthermore, a direct interaction of PP2Calpha and p38 was demonstrated by a co-immunoprecipitation assay. This interaction was observed only when cells were stimulated with stresses or when a catalytically inactive PP2Calpha mutant was used, suggesting that only the phosphorylated form of p38 interacts with PP2Calpha.

[0165] Das et al. (1996) determined the crystal structure of PPM1A, which they called PP2C. The structure revealed a novel protein fold with a catalytic domain composed of a central beta sandwich that binds 2 manganese ions, which is surrounded by alpha helices. The authors stated that the protein architecture and deduced catalytic mechanism are similar to the PP1, PP2A, and PP2B family of protein ser/thr phosphatases.

[0166] Ofek et al. (Cell Cycle Regulation and p53 Activation by Protein Phosphatase 2Calpha, J Biol Chem 2003 Apr. 18; 278(16):14299-305) note that protein phosphatase 2C (PP2C) dephosphorylates a broad range of substrates, regulating stress response and growth-related pathways in both prokaryotes and eukaryotes. They demonstrate that PP2Calpha, a major mammalian isoform, inhibits cell growth and activates the p53 pathway. In 293 cell clones, in which PP2Calpha expression is regulated by a tetracycline-inducible promoter, PP2Calpha overexpression led to G(2)/M cell cycle arrest and apoptosis. Furthermore, PP2Calpha induced the expression of endogenous p53 and the p53-responsive gene p21. Activation of the p53 pathway by PP2Calpha took place both in cells harboring endogenous p53, as well as in p53-null cells transfected with exogenous p53. Induction of PP2Calpha resulted in an increase in the overall levels of p53 protein as well as an augmentation of p53 transcription activity. The dephosphorylation activity of PP2Calpha is essential to the described phenomena, as none of these effects was detected when an enzymatically inactive PP2Calpha mutant was overexpressed. p53 plays an important role in PP2Calpha-directed cell cycle arrest and apoptosis because perturbation of p53 expression in human 293 cells by human papillomavirus E6 led to a significant increase in cell survival. The role of PP2Calpha in p53 activation is discussed.

[0167] Another sequence (Lab Designation 10_{—}3bE_rE (SEQ ID NO: 15)) comprises sequence encoding EUKARYOTIC TRANSLATION INITIATION FACTOR 4-GAMMA, 3 (EIF4G3).

[0168] Mammalian eukaryotic translation initiation factor 4G (eIF4G) is a scaffolding polypeptide that appears to be responsible for recruiting the 43S preinitiation complex to the mRNA through interactions with eIF4E (133440), eIF4A (see 602641), eIF3 (see 602039), and 40S ribosomes. See eIF4GI (600495). Gradi et al. (1998) identified a partial human cDNA encoding a protein with homology to human and rabbit eIF4GI. By screening additional libraries, the authors isolated cDNAs corresponding to the complete coding region of the novel protein, which they designated eIF4GII. The predicted 1,585-amino acid eIF4GI protein is 46% identical to eIF4G1. On Western blots, both eIF4G proteins migrated at approximately 220 kD. Using an in vitro assay, Gradi et al. (1998) showed that eIF4GII, like eIF4GI, was cleaved by the picornavirus rhinovirus 2A(pro). Far Western analysis and coimmunoprecipitation experiments demonstrated that eIF4GII directly interacts with eIF4E, eIF4A, and eIF3. eIF4GII restored cap-dependent translation in a reticulocyte lysate that had been pretreated with rhinovirus 2A(pro) to cleave endogenous eIF4G, leading the authors to conclude that eIF4GII is a functional homolog of eIF4GI. Northern blot analysis revealed that eIF4GII is expressed ubiquitously as 5.2-kb and 6,0-kb mRNAs. Imataka et al. (1998) demonstrated that the N-terminal regions of both eIF4GI and eIF4GII bind to PABP (604679). EIF4G is associated with poliovirus (Irurzun et al.).

[0169] Other sequences (Lab Designation 10_{—}4b_{—}4-rE (SEQ ID NO: 7)) and 10_{—}3b_{—}2-rE (SEQ ID NO: 13)) comprise sequence encoding KLHL6 protein and these sequences map to chromosome 3q27.3. This protein has the same domains as the gata4 protein described above.

[0170] Another sequence (Lab Designation 10_{—}4A_{—}8_rE (SEQ ID NO: 3)) comprises sequence encoding the gas 5 protein and this sequence maps to chromosomal location 1q23.3. The murine gas5 gene was originally isolated based on its preferential expression in the growth arrest phase of the cell cycle (Barone et al.) This gene contains 12 exons from which two alternatively spliced transcripts have been initially identified. More recently, it has been reported that both human and murine gas5 genes contain in their introns sequences homologous to the small nucleolar RNAs involved in the processing of ribosomal RNA. Here we report on the identification and analysis of the expression pattern of two novel alternatively spliced mouse gas5 mRNAs which contain no obvious open reading frame (ORF). Using antibodies generated against the putative amino acid sequence deduced from the gas5 cDNAs, we were not able to detect any Gas5 protein in cultured cells or murine tissues extracts. Even more definitive evidence that the gas5 gene may not encode a protein was obtained by cloning and sequencing the rat gas5 gene which revealed that the putative ORF is interrupted by a stop codon after the first 13 amino acids, correspondint or corresponds to the W region located between genes F9L and A38L. Within the terminal 13 kbp, colinearity is disrupted and multiple poxvirus gene homologues are absent or share a lower percentage of amino acid identity. Most of these differences involve genes and gene families with likely functions involving viral virulence and host range. Three open reading frames (SPV018, SPV019. and SPV020) are unique for SWPV. Phylogenetic analysis, genome organization, and amino acid identity indicate that SWPV is most closely related to the capripoxvirus lumpy skin disease virus, followed by the yatapoxvirus yaba-like disease virus and the leporipoxviruses. The gene complement of SWPV better defines Suipoxvirus within the Chordopoxyirinae subfamily and provides a basis for future genetic comparisons

[0171] Another sequence (Lab Designation 12CX#6_rE (SEQ ID NO: 50)) comprises sequence encoding zfp-36. Zfp-36, the gene encoding the putative zinc finger protein tristetraprolin (TTP), is rapidly induced in fibroblasts by a variety of growth factors. Recent gene knockout experiments have shown that TTP-deficient mice developed arthritis, cachexia, and autoimmunity, all apparently mediated by an excess of tumor necrosis factor alpha. Lai et al. showed that full serum inducibility of Zfp-36 requires elements in the promoter; in addition, removal of the single intron strikingly inhibited serum-induced TTP expression. Lai et al also showed that replacement of the intron with unrelated sequences, or removal of 95% of the intron but retention of the splice sites, each resulted in the maintenance of approximately 45 and 19%, respectively, of full serum-induced expression. In addition, deletion of intron sequences base pairs 601-655 decreased the serum-induced expression of TTP by 65%. Sequence base pairs 618-626 bound specifically to the transcription factor Sp1; mutation of this binding motif decreased TTP expression by 70%, suggesting that Sp1 binding to this motif contributes to serum induction of Zfp-36 (Lai et al.).

[0172] Another sequence (Lab Designation 12CXY#7_rE (SEQ ID NO: 62)) comprises sequence encoding PROTEASE, SERINE, 11 or PRSS11. This protein is also known as HTRA; HOMOLOG OF E. COLI HTRA; HTRA; HTRA1 and maps to chromosomal location 10q25.3-q26.2.

[0173] Insulin-like growth factors (IGFs; see 147440) stimulate the proliferation and differentiation of a vast number of cell types. The action of the growth factors is mediated and controlled by a complex system of components, including at least 2 different forms of IGF, 2 IGF receptors (e.g., 147370), 7 different IGF-binding proteins (IGFBPs; see 146730), and several proteases that cleave the IGFBPs.

[0174] Zumbrunn and Trueb (1996) cloned the cDNA for a human protein, termed L56 by them, that seemed to be part of the IGF signaling system. The predicted protein encodes a 480-amino acid polypeptide with a molecular mass of 51 kD. Zumbrunn and Trueb (1996) found that PRSS11 contains a secretory signal sequence, an IGFBP-binding domain, and a serine protease domain. The serine protease domain is most similar to certain bacterial serine proteases. By Northern blot analysis, Zumbrunn and Trueb (1996) showed that PRSS11 is expressed in a variety of human tissues, with strongest expression in placenta.

[0175] Hu et al. (1998) also cloned PRSS11. The deduced 480-amino acid protein is 98% identical to the cow, guinea pig, and rabbit proteins. It contains an N terminus homologous to MAC25 (IGFBP7; 602867) with a conserved Kazal-type serine protease inhibitor motif, as well as a C-terminal PDZ domain. Semiquantitative RT-PCR and immunoblot analyses showed an approximately 7-fold increase of PRSS11 in osteoarthritis cartilage compared with controls. Functional and mutational analyses indicated that PRS11 is a serine protease dependent on the presence of a serine at position 328.

[0176] Using fluorescence in situ hybridization, Zumbrunn and Trueb (1997) mapped the PRSS11 gene to 10q25.3-q26.2.

[0177] Another sequence (Lab Designation 12PSA#6-rE (SEQ ID NO: 4)) comprises sequence encoding EUKARYOTIC TRANSLATION INITIATION FACTOR 3 THETA. This protein is also known as EIF3-THETA EIF3, p180 SUBUNIT, EIF3, p170 SUBUNIT, CYTOPLASMIC PROTEIN p167, MOUSE HOMOLOG OF CENTROSOMIN B. This sequence maps to chromosomal location 10q26.

[0178] Eukaryotic translation initiation factors (EIFs) initiate protein synthesis from mRNAs. EIF3, at 650 kD, is the largest of the EIFs. According to Johnson et al. (1997), EIF3 has been implicated in several roles, including binding to the 40S ribosomal subunit and to other EIFs, possibly to align the factors for initial binding to the 40S subunit and the subsequent identification of the AUG initiation codon. The EIF3 protein synthesis initiation factor is composed of at least 8 subunits, the largest of which is p180.

[0179] Another sequence (Lab Designation 12_{—}3B#2_Lac (SEQ ID NO: 218)) comprises sequence encoding UBIQUITIN-ACTIVATING ENZYME E1C or UBE1C. This protein is also known as S. CEREVISIAE, HOMOLOG OF UBIQUITIN-ACTIVATING ENZYME 3, UBA3. This sequence maps to human chromosomal location 3p14.

[0180] Ubiquitin (191320) is covalently attached to target proteins by a multienzymatic system consisting of E1 (ubiquitin-activating), E2 (ubiquitin-conjugating), and E3 (ubiquitin-ligating) enzymes. Osaka et al. (1998) found that NEDD8 (603171), a ubiquitin-like protein, is conjugated to proteins in a manner analogous to ubiquitinylation. They found that APP-BP1 (beta-amyloid precursor protein-binding protein-1) can bind to NEDD8 in rabbit reticulocyte lysates. However, since APP-BP1 shows similarity to only the N-terminal domain of an E1 enzyme, the authors reasoned that it must interact with a protein showing similarity to the C-terminal region of E1s. By searching sequence databases, Osaka et al. (1998) identified cDNAs encoding UBA3, the human homolog of yeast Uba3. The predicted 442-amino acid UBA3 protein shares 43% sequence identity with yeast Uba3. In vitro, UBA3 formed a complex with APP-BP1 and a thioester linkage with NEDD8. Osaka et al. (1998) suggested that the APP-BP1/UBA3 complex functions as an E1-like enzyme for the activation of NEDD8.

[0181] Another sequence (Lab Designation 12_{—}4B#7_rE (SEQ ID NO: 21)) comprises sequence encoding PEPTIDYL-PROLYL CIS-TRANS ISOMERASE A (PPIASE) also known as ROTAMASE, CYCLOPHILIN A or CYCLOSPORIN A-BINDING PROTEIN. This protein maps to chromosomal location 9q31.3.

[0182] A protein designated chickpea cyclophilin-like antifungal protein (CLAP) was isolated from seeds of the chickpea (Cicer arietinum). Chickpea CLAP was characterized by a molecular weight of 18 kDa and an N-terminal sequence homologous to cyclophilins. The protein was isolated with a procedure involving affinity chromatography on Affi-gel blue gel and ion exchange chromatography on CM-Sepharose. In addition to an inhibitory effect on the growth of fungi including Rhizoctonia solani, Mycosphaerella arachidicola and Botrytis cinerea, the protein was capable of inhibiting human immunodeficiency virus-1 reverse transcriptase. Chickpea CLAP did not possess lectin and ribonuclease activities but it weakly inhibited translation in a rabbit reticulocyte lysate system. The protein stimulated 3H-thymidine incorporation by mouse splenocytes.

[0183] Cyclophilin A is the target of the immunosuppressant cyclosporin A (CsA) and is encoded by a single unique gene conserved from yeast to humans. In the pathogenic fungus Cryptococcus neoformans, two homologous linked genes, CPA1 and CPA2, were found to encode two conserved cyclophilin A proteins. In contrast to Saccharomyces cerevisiae, in which cyclophilin A mutations confer CsA resistance but few other phenotypes, cyclophilin A mutations conferred dramatic phenotypes in C. neoformans. The Cpa1 and Cpa2 cyclophilin A proteins play a shared role in cell growth, mating, virulence and CsA toxicity. The Cpa1 and Cpa2 proteins also have divergent functions. Cpa1 mutants are inviable at 39 degrees C. and attenuated for virulence, whereas Cpa2 mutants are viable at 39 degrees C. and fully virulent. Cpa1 Cpa2 double mutants exhibited synthetic defects in growth and virulence. Cyclophilin A active site mutants restored growth of Cpa1 Cpa2 mutants at ambient but not at higher temperatures, suggesting that the prolyl isomerase activity of cyclophilin A has an in vivo function.

[0184] Another sequence (Lab Designation 12_L24_{—}5_{—}3-Lac (SEQ ID NO: 283) comprises sequence encoding HEMOPOIETIC CELL KINASE also known as HCK and KIAA0255. This sequence maps to gene map locus 20q11-q12. This gene was also disrupted off the negative strand in this region and disrupts an unknown gene.

[0185] During a search for a cDNA clone representing human SRC (190090), Quintrell et al. (1987) encountered a previously unrecognized gene that appeared to encode a protein-tyrosine kinase similar to SRC. Ziegler et al. (1987) found the same gene by a different route. Expression of this gene may be limited to certain hemopoietic cells and is especially prominent in cells of myeloid lineage, particularly mature granulocytes and monocytes. Therefore, Quintrell et al. (1987) designated the gene HCK (pronounced ‘hick’) for hemopoietic cell kinase. They described the nucleotide sequence of a cDNA clone that represents most or all of the mRNA for HCK, the deduced amino acid sequence of the protein encoded by HCK, and the distribution of RNA transcribed from HCK among various hemopoietic cells. By spot-blot analysis of sorted chromosomes and by in situ hybridization, Quintrell et al. (1987) assigned the HCK gene to 20q11-q12. Since this region is affected by interstitial deletions in some acute myeloid leukemias and myeloproliferative disorders, they suggested that damage to HCK may contribute to the pathogenesis of these conditions.

[0186] Another sequence (Lab Designation L24_{—}5_{—}2BE-rE (SEQ ID NO: 208) comprises sequence encoding HEPATOCYTE NUCLEAR FACTOR 3-BETA (HNF3B) (Kaestner et al.). This sequence maps to gene map locus 20p11.

[0187] Deleuze et al. (1994) investigated hepatic nuclear factor-3-beta as a candidate gene for Alagille syndrome (AGS; 118450) because of its pattern of expression during embryogenesis in derivatives of the embryonic gut and because of its localization to mouse chromosome 2 (Avraham et al., 1992) in the region syntenic with human chromosome 20 where AGS is located. They found that the gene was not deleted in a deletion case of AGS. The presence of the HNF3B gene in the deleted cells was established by Southern blot hybridization rather than by fluorescence in situ hybridization; hence, the assignment of the human gene to chromosome 20 was based on homology only.

[0188] Mincheva et al. (1997) used fluorescence in situ hybridization to map the HNF3B gene to human chromosome 20p11.

[0189] Another sequence comprises sequence encoding DROSOPHILA HOMOLOG OP DISCS LARGE 5; DLG5. This protein is also known as PLACENTA AND PROSTATE DLG and as PDLG. This sequence maps to gene map locus 10q23.

[0190] Vertebrate homologs of the Drosophila discs large (dlg) gene are members of the MAGUK (membrane-associated guanylate kinase) family. MAGUK proteins contain PDZ motifs, an SH3 domain, and a guanylate kinase (GUK)-homologous region. Both the PDZ and GUK domains are thought to contribute to protein-protein interactions. By searching an EST database for sequences related to Drosophila dlg, Nakamura et al. (1998) identified cDNAs encoding a novel human homolog. Northern blot analysis revealed that the 9,4-kb transcript was highly expressed in placenta and prostate, as well as in several other tissues, leading the authors to designate the gene PDLG (placenta and prostate DLG). An additional 8.8-kb PDLG mRNA was detected in thyroid. The predicted 859-amino acid PDLG protein contains 3 PDZ domains, an SH3 domain, and a GUK region. PDLG is 45% and 40% identical to DLG1 (601014) and Drosophila dlg, respectively. Western blot analysis of extracts of human prostate tissue and various cell lines showed that PDLG has an apparent molecular mass of 105 kD. Immunofluorescence experiments indicated that PDLG is localized at the plasma membrane and cytoplasm, and is expressed in the gland epithelial cells of normal prostate tissue but not in prostate cell lines. Using a yeast 2-hybrid screen, Nakamura et al. (1998) determined that PDLG interacts with the GUK domain of p55 (MPP1; 305360), a palmitoylated erythrocyte membrane MAGUK protein. The authors suggested that PDLG and p55 form a heteromeric MAGUK complex at the plasma membrane and cluster various intracellular molecules to play roles in maintaining the structure of epithelial cells and transmitting extracellular signals to the membrane and cytoskeleton.

[0191] Independently, Nagase et al. (1998) identified KIAA0583, a DLG5 cDNA. By radiation hybrid analysis, they mapped the DLG5 gene to chromosome 10. Using the same technique, Nakamura et al. (1998) refined the localization of the DLG5 gene to 10q23.

[0192] Another sequence (Lab Designation L28AP_rE (SEQ ID NO: 172)) comprises sequence encoding TRANSCRIPTION ELONGATION FACTOR B, 3 or TCEB3. This protein is also known as ELONGIN A and ELONGIN, 110-KD. This sequence maps to chromosomal location 1p36.1

[0193] Eukaryotic transcription and mRNA synthesis are complex biochemical processes controlled in part by the concerted action of a set of general transcription factors that regulate the activity of RNA polymerase II at both the initiation and elongation stages of transcription. Aso et al. (1995) noted that several general initiation factors, including TFIIA (see 600520), TFIIB (189963), TFIID (see 313650), TFIIE (see 189962), and TFIIH (see 189972), and several accessory proteins (e.g., TAFs; see 600475), have been identified in eukaryotic cells and found to promote selective binding of RNA polymerase II to promoters and to support a basal level of transcription.

[0194] Aso et al. (1996) described a full-length cDNA encoding the human homolog. The predicted 722-amino acid protein shares 84% homology with the rat protein. Comparison of the open reading frames of the human cDNA with that of the previously characterized rat cDNA indicated that they are 84% conserved in nucleotide sequence.

[0195] Duan et al. (1995) and Yibel et al. (1995) reported results suggesting that the tumor suppression activity of the von Hippel-Lindau tumor suppressor gene product (193300) is a function of its ability to bind to TCEB2 and TCEB1 and inhibit transcription elongation.

[0196] By fluorescence in situ hybridization, Aso et al. (1995) mapped the TCEB3 gene to 1p36.1. They pointed out that this region has been shown to have deletions in several forms of malignancy.

[0197] Another sequence (Lab Designation 14A7rE (SEQ ID NO: 113)) comprises sequence encoding MOTHERS AGAINST DECAPENTAPLEGIC, or DROSOPHILA, HOMOLOG OF, 7 or MADH7. This protein is also known as SMA- AND MAD-RELATED PROTEIN 7; SMAD7. This sequence maps to gene map locus 18q21.1

[0198] MAD proteins, originally defined in Drosophila, are essential components of the signaling pathways of the transforming growth factor-beta receptor family (e.g., TGFBR1; 190181). Using a differential display approach in cultured endothelial cells subjected to multiple soluble and biomechanical stimuli, Topper et al. (1997) isolated a human endothelial cell cDNA encoding MADH7, which they called SMAD7. The predicted 426-amino acid MADH7 protein lacks the C-terminal putative phosphorylation sites present in other MAD proteins, suggesting that it may be distinctly regulated. In situ hybridization and immunohistochemical analyses on human tissues showed that MADH7 is expressed predominantly in vascular endothelium. The authors demonstrated that MADH7 and MADH6 (602931) can form complexes in endothelial cells. MADH7 was induced in cultured vascular endothelium by fluid mechanical forces and was capable of modulating endothelial gene expression in response to both humoral and biomechanical stimuli in vitro.

[0199] Kavsak et al. (2000) found that the E3 ubiquitin ligase SMURF2 (605532) associates constitutively with SMAD7. SMURF2 is nuclear, but binding to SMAD7 induced export and recruitment to the activated TGFBR, where it caused degradation of receptors and of SMAD7 via proteasomal and lysosomal pathways. Gamma-interferon (IFNG; 147570), which stimulates expression of SMAD7, induced SMAD7-SMURF2 complex formation and increased TGFBR turnover, which was stabilized by blocking SMAD7 or SMURF2 expression. Furthermore, SMAD7 mutants that interfered with recruitment of SMURF2 to the receptors were compromised in their inhibitory activity. These studies defined SMAD7 as an adaptor in an E3 ubiquitin ligase complex that targets TGFBR for degradation.

[0200] Lallemand et al. (2001) showed that cells stably expressing SMAD7 had increased susceptibility to apoptosis induced by TGFB (190180), TNFA (191160), serum withdrawal, or loss of cell adhesion (anoikis). SMAD7 decreased NFKB (164011) activity, providing a mechanism for the increased apoptosis. Stable expression of RAS (190020) suppressed SMAD7 inhibition of NFKB and SMAD7 potentiation of apoptosis.

[0201] By somatic cell hybrid analysis, Topper et al. (1997) mapped the MADH7 gene to human chromosome 18. By FISH, Roijer et al. (1998) refined the localization to 18q21.1.

[0202] Another sequence (Lab Designation 14C_{—}2E/rE (SEQ ID NO: 126)) comprises sequence encoding SIGNAL RECOGNITION PARTICLE, 19-KD (SRP19). This sequence maps to gene map locus 5q21-q22.

[0203] The signal recognition particle (SRP) is a ribonucleoprotein complex that mediates the targeting of proteins to the endoplasmic reticulum (ER). The complex consists of a 7S (or 7SL) RNA and 6 different proteins, SRP9 (600707), SRP14 (600708), SRP19, SRP54 (604857), SRP68 (604858), and SRP72 (602122). The proteins are bound to the 7S RNA as monomers (SRP19 and SRP54) or heterodimers (SRP9/SRP14 and SRP68/SRP72). SRP9 and SRP14 constitute the Alu domain of 7S, whereas the other 4 proteins belong to the S domain. SRP has at least 3 distinct functions that can be associated with the protein subunits: signal recognition, translational arrest, and ER membrane targeting by interaction with the docking protein.

[0204] By screening a liver cDNA library with an anti-SRP19 probe, Lingelbach et al. (1988) isolated a human SRP19 cDNA encoding a 144-amino acid protein. Sequence analysis showed that SRP19 contains a very basic C-terminal domain of 7 lysine residues interrupted by 2 glycine residues. Northern blot analysis revealed expression of a 0.9 kb transcript in HeLa cells. SDS-PAGE analysis showed that SRP19 is expressed as a 19-kD protein, identical in size to canine SRP19. Functional analysis determined that the SRP19 protein binds to 7SL RNA in canine pancreas.

[0205] In 2 small nested deletions of 100 to 260 kb identified by Joslyn et al. (1991) in patients with adenomatous polyposis coli (APC; 175100), Groden et al. (1991) identified 3 genes in a span of about 100 kb on chromosome 5. One of these was DP1 (125265); a second was the gene that is mutant in APC (175100), called by them DP2.5. A third was a gene which was found to have the same sequence as that of SRP19. SRP19 was shown to have 5 exons and to lie between DP1 and DP2.5. Horii et al. (1993) discussed the occurrence of alternative splicing not only within the APC gene but also between the APC gene and the neighboring SRP19 gene.

[0206] Wild et al. (2001) reported the 1.8-angstrom resolution crystal structure of human SRP19 in complex with its primary binding site on helix 6 of SRP RNA, which consists of a stem-loop structure closed by an unusual GGAG tetraloop. Protein-RNA interactions are mediated by the specific recognition of a widened major groove and the tetraloop without any direct protein-base contacts and include a complex network of highly ordered water molecules. Wild et al. (2001) proposed a model of the assembly of the SRP core comprising SRP19, SRP54, and SRP RNA based on crystallographic and biochemical data.

[0207] Another sequence (Lab Designation 14C_{—}24_{—}#6_Lac (SEQ ID NO: 47)) comprises sequence encoding FER-1, C. ELEGANS, HOMOLOG-LIKE 3; FER1L3. This protein is also known as MYOFERLIN or MYOF. This sequence maps to gene map location 10q23.32.

[0208] Dysferlin (DYSF; 603009), the gene product of the limb-girdle muscular dystrophy 2B locus (LGMD2B; 253601), encodes a membrane-associated protein with homology to Caenorhabditis elegans fer-1. Humans with mutations in dysferlin develop muscle weakness that affects both proximal and distal muscles. Strikingly, the phenotype in LGMD2B patients is highly variable, but the type of mutation in DYSF did not explain this phenotypic variability. Through electronic database searching, Davis et al. (2000) identified a protein highly homologous to dysferlin that they named myoferlin. The open reading frame of myoferlin predicted a 2,061-amino acid protein. By Northern blot analysis, the authors observed a 7.5-kb myoferlin mRNA transcript highly expressed in cardiac muscle and to a lesser degree in skeletal muscle. However, antibodies raised against myoferlin showed abundant expression of myoferlin (molecular weight 230 kD) in both cardiac and skeletal muscle. Within the cell, myoferlin was associated with the plasma membrane but, unlike dysferlin, myoferlin was also associated with the nuclear membrane. Ferlin family members contain C2 domains, and these domains play a role in calcium-mediated membrane fusion events. To investigate this, Davis et al. (2000) studied the expression of myoferlin in the mdx mouse, which lacks dystrophin and whose muscles undergo repeated rounds of degeneration and regeneration. They found upregulation of myoferlin at the membrane in mdx skeletal muscle. Davis et al. (2000) suggested myoferlin (MYOF) as a candidate gene for muscular dystrophy and cardiomyopathy, or possibly a modifier of the muscular dystrophy phenotype.

[0209] Another sequence (Lab Designation 14_{—}7#2E-rE (SEQ ID NO: 5 and SEQ ID NO: 115)) comprises sequence encoding ALPHA-1,3-@MANNOSYL-GLYCOPROTEIN BETA-1,2-N-ACETYLGLUCOSAMINYLTRANSFERASE or MGAT1. This protein is also known as GlcNAc-T I, MGAT, UDP-N-ACETYLGLUCOSAMNE:ALPHA-3-D-MANNOSIDE BETA-1,2-N-ACETYLGLUCOSAMINYLTRANSFERASE I (GLCT1). This sequence maps to gene map locus 5q35.

[0210] There are believed to be over 100 different glycosyltransferases involved in the synthesis of protein-bound and lipid-bound oligosaccharides. One of these, UDP-N-acetylglucosamine:alpha-3-D-mannoside beta-1,2-N-acetylglucosaminyltransferase I (GlcNAc-T I; EC 2.4.1.101), is a medial-Golgi enzyme essential for the synthesis of hybrid and complex N-glycans. Kumar and Stanley (1989) identified the human gene encoding N-acetylglucosaminyltransferase I by complementation of the glycosylation defect in the Lec1 Chinese hamster ovary (CHO) cell mutant. Kumar et al. (1990) cloned the gene. The overall features of the cDNA and deduced protein sequence (445 amino acids) were typical of other Golgi transferases that are type II transmembrane proteins. Hull et al. (1991) isolated 2 overlapping genomic DNA clones which span 18 kb containing the single 2,5-kb exon for GlcNAc-T I. The exon includes most of the 5-prime untranslated region, the complete coding sequence (1,335 bases, 445 amino acids), and the complete 3-prime untranslated region. Southern blot analysis indicated that the gene (symbolized GLCT1) exists in single copy in the human genome, and study of human-hamster somatic cell hybrids indicated that the gene is located on chromosome 5. Pownall et al. (1992) demonstrated that the sequence of the mouse gene Mgat1 is highly conserved with respect to the human and rabbit homologs and exists as a single protein-encoding exon. They mapped the gene to mouse chromosome 11, closely linked to the gene encoding IL3 (147740), by the analysis of multilocus interspecies backcrosses. Thus, the human gene may be in the same area as IL3, i.e., 5q23-q31. Kumar et al. (1992) mapped the gene to 5q31.2-q31.3 by in situ hybridization. Tan et al. (1995) reported that the MGAT1 gene maps to 5q35 by fluorescence in situ hybridization. They considered the discrepancy with the findings of Kumar et al. (1992) to be due to greater precision of fluorescence analysis compared with radioactive in situ hybridization. Shows (1999) stated that by use of more sensitive FISH technology than that used in their 1992 report (Kumar et al., 1992), he and his colleagues confirmed the assignment of the MGAT1 gene to 5q35.

[0211] Another sequence (Lab Designation 19_{—}9BE_rE (SEQ ID NO: 123)) comprises sequence encoding CLEAVAGE STIMULATION FACTOR, 3-PRIME PRE-RNA, SUBUNIT 2,64-KD (CSTF2). This sequence maps to human chromosome Xq21.33.

[0212] Polyadenylation of mRNA is a complex process that requires multiple protein factors, including 3 cleavage stimulation factors (CSTF1, 600369; CSFT2, and CSTF3, 600367). CstF2, a 64-kD protein, contains a ribonucleoprotein (RNP)-type RNA binding domain in the N-terminal region (Takagaki et al., 1992). The CstF2 protein expressed in E. coli can be cross-linked to RNAs containing polyadenylation signal sequences (AAUAAA).

[0213] The concentration of one CSTF subunit (CSTF-64) increases during activation of B cells, and this is sufficient to switch IgM heavy chain mRNA expression from membrane-bound form to secreted form (Takagaki et al., 1996). To extend this observation, Takagaki and Manley (1998) disrupted the endogenous CstF-64 gene in the chicken B-cell line DT40 and replaced it with a regulatable transgene. Strikingly, a 10-fold decrease in CstF-64 concentration did not markedly affect cell growth but specifically and dramatically reduced accumulation of IgM heavy chain mRNA. Further reduction caused reversible cell cycle arrest in G0/G1 phase, while depletion resulted in apoptotic cell death.

[0214] Another sequence (Lab Designation 1A_A549_{—}6-rE SEQ ID NO: 310)) comprises sequence encoding RET FINGER PROTEIN 2 (RFP2). This protein is also known as LEU5. This sequence maps to gene map locus 13q14.3

[0215] B-cell chronic lymphocytic leukemia is often associated with the loss of a region on chromosome 13q14 between the retinoblastoma gene (RB1; 180200) and locus D13S25 (Liu et al., 1993; Liu et al., 1995), suggesting that a tumor suppressor gene may be located in this region. By constructing a cosmid contig corresponding to the minimally deleted region and screening a pre-B lymphocyte cDNA library, Kapanadze et al. (1998) isolated several clones, one of which contained an ORF encoding a deduced 407-amino acid protein, RFP2, which they called LEU5. RFP2 contains a zinc finger domain of the RING type and shares significant homology with the RET finger protein (RFP; 602165) and the tumor suppressor gene BRCA1 (113705). Kapanadze et al. (1998) mapped the RFP2 gene close to D13S272, bordering the minimally deleted region.

[0216] Another sequence (Lab Designation 31_{—}3_{—}5_rE (SEQ ID NO: 158)) comprises sequence encoding ZINC FINGER PROTEIN 207 (ZNF207). This sequence maps to gene map locus 6p21.3.

[0217] Pahl et al. (1998) isolated a human vascular smooth muscle cell cDNA encoding a protein that they designated ZNF207. The predicted 478-amino acid protein is composed of nearly 20% proline residues and contains a potential nuclear localization signal at the N-terminus and 2 C2H2 zinc finger motifs. Northern blot analysis revealed that ZNF207 is expressed ubiquitously.

[0218] By fluorescence in situ hybridization, Pahl et al. (1998) mapped the ZNF207 gene to 6p21.3. Rasooly (1999) noted that the ZNF207 sequence is contained within a cloned region from chromosome 17 (AC005899).

[0219] Another sequence (Lab Designation 21_{—}5_{—}7E_Lac (SEQ ID NO: 137)) comprises sequence encoding INHIBITOR OF DNA BINDING 3 (ID3). This protein is also known as HEIR1 and the sequence maps to gene map locus 1p36.13-p36.12

[0220] Ellmeier et al. (1992) isolated a novel human gene encoding a helix-loop-helix (HLH) protein by molecular cloning of chromosome 1p36-specific CpG islands. Initially termed HEIR1, the ID3 gene was localized to the neuroblastoma consensus deletion region, 1p36.2-p36.12. Its predicted protein was 95.8% identical to the mouse HLH462 protein and had clear homology to the mouse Id and Drosophila emc proteins. The gene was expressed at high abundance in adult lung, kidney, and adrenal medulla, but not in adult brain. Despite prominent HEIR1 expression in adrenal medulla, which is a prime target for neuroblastomas, 10 of 12 neuroblastoma-derived cell lines showed very low levels of HEIR1 mRNA. Low HEIR1 expression was generally found in tumor cell lines with NMYC (164840) overexpression, whereas the 2 cell lines displaying high HEIR1 levels did not overexpress NMYC. Mutually exclusive expression of the 2 genes was also found by in situ hybridization in developing mouse tissues, particularly in the forebrain neuroectoderm. Ellmeier et al. (1992) concluded that HEIR1 expression is reduced specifically in the majority of neuroblastomas and suggested an inverse correlation between HEIR1 and NMYC expression in these tumors and in embryonic development.

[0221] Deed et al. (1994) reported a comparison of the ID3 gene with ID1 (600349) and ID2 (600386) that showed a highly conserved protein-coding gene organization consistent with evolution from a common ancestral gene. By using a YAC clone of ID3 for fluorescence in situ hybridization, they mapped the ID3 gene to 1p36.1. White et al. (1995) could exclude ID3 as a candidate for the neuroblastoma suppressor gene because it lies outside the loss of heterozygosity (LOH) region revealed by neuroblastoma studies (see NBS; 256700).

[0222] Id proteins may control cell differentiation by interfering with DNA binding of transcription factors. Lyden et al. (1999) demonstrated that the targeted disruption of Id1 and Id3 in mice results in premature withdrawal of neuroblasts in the cell cycle and expression of neural-specific differentiation markers. Lyden et al. (1999) crossed Id1+/− and Id3+/−mice. Offspring lacking 1 to 3 Id alleles in any combination were indistinguishable from wildtype, but no animals lacking all 4 Id alleles were born. The Id1-Id3 double knockout mice displayed vascular malformations in forebrain and absence of branching and sprouting of blood vessels in the neuroectoderm. As angiogenesis both in the brain and in tumors requires invasion of avascular tissue by endothelial cells, Lyden et al. (1999) examined Id knockout mice for their ability to support the growth of tumor xenografts. Three different tumors failed to grow and/or metastasize in Id1+/−Id3−/− mice, and any tumor growth present showed poor vascularization and extensive necrosis. Lyden et al. (1999) concluded that Id genes are required to maintain the timing of neuronal differentiation in the embryo and invasiveness of the vasculature. Because the Id genes are expressed at very low levels in adults, they make attractive targets for antiangiogenic drug design. Lyden et al. (1999) also concluded that the premature neuronal differentiation in Id1-Id3 double knockout mice indicates that ID1 or ID3 is required to block the precisely timed expression and activation of positively acting bHLH proteins during murine development.

[0223] Pan et al. (1999) found that Id3-deficient mice had no overt abnormalities but had compromised humoral immunity. After immunization with T cell-dependent or T cell-independent antigens, the responses of Id3-deficient mice were attenuated and severely impaired, respectively. T-cell proliferative responses appeared to be intact, but IFNGamma expression may have been impaired. The defect in B-cell proliferation could be rescued by ectopic expression of Id1.

[0224] ID3 is an inhibitor of E proteins, such as E2A (147141). By Northern and Western blot analysis, Kee et al. (2001) showed that in mouse transforming growth factor-beta (190180) rapidly induced transient Id3 expression in B-lymphocyte precursors. This induction involved activation of the SMAD (see 602932) transcription factor pathway.

[0225] Another sequence (Lab Designation 31_{—}3_{—}6_{—}2_Lac (SEQ ID NO: 248)) comprises sequence encoding FK506-BINDING PROTEIN 8 (FKBP8). This protein is also known as FK506-BINDING PROTEIN, 38-KD (KBP38)).

[0226] FKBPs are intracellular receptors for the immunosuppressive drug FK506. The FKBP/FK506 complex exerts its immunosuppressive effects by inhibiting calcineurin (e.g., PPP3CA; 114105), a calcium- and calmodulin (e.g., CALM1; 114180)-dependent serine/threonine phosphatase that functions as a critical signaling molecule during T-cell activation. By PCR using Jurkat cell cDNA and degenerate oligonucleotides based on conserved regions of FKBPs, Lam et al. (1995) identified a cDNA encoding FKBP8. The deduced 355-amino acid FKBP8 protein shares 26 to 28% amino acid sequence identity with other known human FKBPs. FKBP8 contains an N-terminal domain that is 33% identical to FKBP12 (FKBP1A; 186945), a putative leucine zipper domain, a 3-unit imperfect tetratricopeptide repeat (TPR) domain, and a putative calmodulin-binding domain. Northern blot analysis detected a single, approximately 1.35- to 2,4-kb FKBP8 transcript in all human tissues examined, with the highest expression in brain.

[0227] Another sequence (Lab Designation 31_{—}3_{—}9-rE (SEQ ID NO: 135)) comprises sequence encoding MAIL, a nuclear I kappa B protein that potentiates LPS-induced IL 6 production. This sequence maps to gene map locus 3q21.3.

[0228] Kitamura et al. identified and characterized a novel member of the ankyrin-repeat family named ‘molecule possessing ankyrin-repeats induced by lipopolysaccharide’ (MAIL). The C-terminal portion of MAIL shared high sequence homology with the I kappa B family. Intraperitoneal injection of lipopolysaccharide (LPS) into mice rapidly (<0.5 h) induced MAIL mRNA in various tissues, particularly in the spleen, lymph node, and lung. Ectopically expressed MAIL was localized in the nucleus, and remarkably potentiated the LPS-induced mRNA expression and secretion of interleukin (IL)-6 in Swiss 3T3 cells. These findings indicated that MAIL is one of the nuclear I kappa B proteins and an activator of IL-6 production.

[0229] Another sequence (Lab Designation 34X23_{—}1-rE (SEQ ID NO: 149)) comprises sequence encoding CASPASE RECRUITMENT DOMAIN-CONTAINING PROTEIN 4 (CARD4). This protein is also known as NOD1 PROTEIN (NOD1). This sequence maps to gene map locus 7p15-p14.

[0230] APAF1 (602233) in mammals and Ced4 in the worm are members of a family of intracellular proteins composed of an N-terminal caspase recruitment domain (CARD), a centrally located nucleotide-binding domain (NBD), and a C-terminal regulatory domain, which consists of WD40 repeats in the case of APAF1. The APAF1 WD40 repeats act as recognition domains for mitochondrial damage, which leads to APAF1 oligomerization and eventual apoptosis through homophilic CARD-CARD interaction with the prodomain of caspase-9 (CASP9; 602234).

[0231] By searching a proprietary EST database for sequences encoding CARD motifs, followed by screening an endothelial cell cDNA library, Berfin et al. (1999) obtained a cDNA encoding CARD4. The deduced 953-amino acid CARD4 protein contains an N-terminal CARD motif, an NBD, and unlike APAF1, 10 tandem leucine-rich repeats in its C terminus. Northern blot analysis revealed abundant expression of a 4,5-kb transcript in adult heart, spleen, and lung, as well as in numerous cancer cell lines and fetal tissues. Yeast 2-hybrid analysis using the CARD domain of CARD4 as bait to screen breast, prostate, and brain cDNA libraries, as well as coimmunoprecipitation analysis, indicated preferential interaction with the CARD of RICK (RIPK2; 603455). Luciferase reporter analysis showed that the CARD domain of CARD4, but not that of APAF1, potently induces activation of nuclear factor kappa-B (see 164011), but not of JUN N-terminal kinase (see 601158), in a concentration-dependent manner.

[0232] Using similar methods, Inohara et al. (1999) cloned and characterized CARD4, which they called NOD1. Northern blot analysis detected wide expression of NOD1. In situ hybridization analysis showed relatively restricted expression of Nod1 in day-15.5 mouse embryos. Confocal microscopy demonstrated that NOD1 is a cytosolic protein. Coimmunoprecipitation analysis revealed that NOD1 preferentially interacts with procaspases containing CARDs or death effector domains (DEDs), as well as with itself, RICK, and CLARP (CFLAR; 603599), but not with RAIDD (CRADD; 603454), APAF1, NIK (604655), or other CARD- or DED-containing proteins. Functional analysis indicated that the CARD and NBD of NOD1, but not the LRR, enhance apoptosis induced by CASP9, but not by other caspases or CLARP. The CARD was found to be essential for NOD1 to bind and activate CASP9, as well as to promote apoptosis. Inohara et al. (1999) also observed that NOD1 interacts with RICK in NFKB activation.

[0233] By genomic sequence analysis, Inohara et al. (1999) determined that the NOD1 gene contains 7 coding and 7 noncoding exons and maps to 7p15-p14.

[0234] Another sequence (Lab Designation 34X23_{—}3-rE (SEQ ID NO: 152)) comprises sequence encoding mdr1b or mdr1. This protein is also known as Abcb1b. This sequence maps to human chromosomal location 7q21.1.

[0235] Song et al. “Identification and characterization of a hepatoma cell-specific enhancer in the mouse multidrug resistance mdr1b promoter” J Biol Chem., 270(43):25468-74) (Oct. 27, 1995) demonstrate that the expression of multidrug resistance/P-glycoprotein genes mdr1b(mdr1) and mdr1a(mdr3) is elevated during hepatocarcinogenesis. To investigate the regulation of mdr1b gene expression, they used transient transfection expression assays of reporter constructs containing various 5′-mdr1b flanking sequences in hepatoma and non-hepatoma cells. They found that nucleotides −233 to −116 preferentially enhanced the expression of reporter gene in mouse hepatoma cell lines in an orientation- and promoter context-independent manner. DNase I footprinting using nuclear extracts prepared from hepatoma and non-hepatoma cells identified four protein binding sites at nucleotides −205 to −186 (site A), −181 to −164 (site B), −153 to −135 (site C), and −128 to −120 (site D). Further analyses revealed that, while site B alone played a major part for the enhancer function, sites A and B combined conferred full enhancer activity. Site-directed mutagenesis results also supported these results. Gel retardation experiments using oligonucleotide competitors revealed that the site B contains a dominant binding protein. This was the first report demonstrating a cell type-specific enhancer in the mdr locus. The role of this enhancer in the activation of mdr1b gene during hepatocarcinogenesis is discussed by the authors.

[0236] Hsu et al. “Differential overexpression of three mdr gene family members in multidrug-resistant J774.2 mouse cells. Evidence that distinct P-glycoprotein precursors are encoded by unique mdr genes” J Biol Chem, 15; 264(20):12053-62, (July 1989) show that a hallmark of the multidrug-resistant phenotype is the overproduction of a family of 130-180-kDa integral membrane phosphoglycoproteins collectively called P-glycoprotein. Gene-specific hybridization probes were derived from three classes of mouse P-glycoprotein cDNAs. These probes revealed the differential amplification and/or transcriptional activation of three distinct but closely related mdr genes (mdr1a, mdr1b, and mdr2) in independently selected multidrug-resistant J774.2 mouse cell lines. Overexpression of mdr1a and mdr1b was found to correlate, in general, with the differential overproduction of either a 120- or 125-kDa P-glycoprotein precursor, respectively. This same correlation was observed in a single cell line during the course of stepwise selection for resistance to vinblastine in which a switch in gene expression from mdr1b to mdr1a resulted in a switch from the 125- to 120-kDa P-glycoprotein precursor. These findings suggest that differential overexpression of distinct mdr genes which encode unique P-glycoprotein isoforms is a possible mechanism for generating diversity in the multidrug-resistant phenotype.

[0237] Another sequence (Lab Designation 34X24_{—}126-rE (SEQ ID NO: 148)) comprises sequence encoding MITOGEN-ACTIVATED PROTEIN KINASE KINASE KINASE 7-INTERACTING PROTEIN 1 (MAP3K7IP1). This protein is also known as TAK1-BINDING PROTEIN 1 or TAB1. This sequence maps to Gene map locus Chr.22.

[0238] Shibuya et al. (1996) used the yeast 2-hybrid system to identify brain cDNAs encoding proteins that interacted with TAK1 (602614). They recovered a gene encoding a predicted 504-amino acid protein that they named TAB1 (TAK1-binding protein-i). On Northern blots, TAB1 was expressed as a 3.5-kb mRNA in all tissues tested.

[0239] Shibuya et al. (1996) found that in both yeast and mammalian cells, TAB1 activated the kinase activity of TAK1 by direct interaction. They showed that the C-terminal 68 amino acids of TAB1 are sufficient for binding and activation of TAK1 in mammalian cells, while the N-terminal 418 amino acids act as a dominant-negative inhibitor of transforming growth factor-beta (TGFB; 190180)-induced gene expression. Since TAK1 functions as a MAPKKK in the TGFB signaling pathway, Shibuya et al. (1996) suggested that TAB1 may be an important signaling intermediate between TGFB receptors and TAK1.

[0240] Using a yeast 2-hybrid screen of gastrointestinal tract tissue with p38-alpha (MAPK14; 600289) as the bait, Ge et al. (2002) isolated multiple clones encoding TAB1. Immunoprecipitation and GST pull-down analyses indicated that TAB1 interacts with p38-alpha, but not with other MAPKs, with or without treatment with TNF (191160). Immunoblot analysis showed that coexpression of TAB1 and p38-alpha enhanced autophosphorylation of p38-alpha even in the presence of dominant-negative forms of MAP2Ks (e.g., MAP2K3; 602315) and TAK1. The amino acids between positions 373 and 418 of TAB1 were found to be required for phosphorylation of p38-alpha. Expression of TLR2 (603028) caused p38-alpha phosphorylation in the presence or absence of inhibitors, whereas p38-alpha phosphorylation after stimulation of TLR4 (603030) could be inhibited by mutant TAB1, suggesting that activation of p38-alpha can be TAB1 dependent or independent. Immunoblot analysis detected the formation of TRAF6 (602355)-TAB1-p38-alpha complexes. Formation of these complexes could be enhanced by stimulation with lipopolysaccharide. Ge et al. (2002) concluded that activation of p38-alpha by a nonenzymatic adaptor protein such as TAB1 may be an important alternative activation pathway operating in parallel with kinase cascades in regulating intracellular signaling.

[0241] The International Radiation Hybrid Mapping Consortium mapped the TAB1 gene to chromosome 22 (WI-18691).

[0242] Another sequence (Lab Designation 36_{—}5_{—}2_{—}6-rE (SEQ ID NO: 150)) comprises sequence encoding BROMODOMAIN-CONTAINING PROTEIN 2 (BRD2). This protein is also known as FEMALE STERILE HOMEOTIC-RELATED GENE 1, MOUSE HOMOLOG OF FSRG1 (RING3). This sequence maps to gene map locus 6p21.3.

[0243] In a search for novel genes in the human major histocompatibility complex (MHC) class II region on chromosome 6p21.3, Okamoto et al. (1991) and Beck et al. (1992) identified a gene that they termed RING3 (‘RING’ is an acronym for ‘really interesting new gene.’). Based on mapping and genomic sequencing, RING3 was located in the middle of the class II region between the genes HLA-DNA (142930) and HLA-DMA (142855). In contrast to all the other genes encoded in the class II region, RING3 appeared to have no obvious function associated with the immune system based on sequence comparisons. The striking sequence similarity to the female sterile homeotic (fsh) gene in Drosophila, however, suggested a conserved biologic function for RING3. Denis and Green (1996) discovered that the RING3 product is, in fact, a mitogen-activated nuclear kinase involved in signal transduction and that it is upregulated in certain types of leukemia. With the aim of learning more about the phylogeny of RING3, Thorpe et al. (1996) identified further homologs in different species and determined their gene structures. The functional analysis of RING3 had been further complicated by the finding of a second, non-MHC-linked copy of RING3 in humans by Nomura et al. (1994). This was referred to by them as ORFX (601541). Using a PCR probe derived from the ORFX cDNA sequence, Thorpe et al. (1996) mapped ORFX to 9q34 by fluorescence in situ hybridization analysis. Several other MHC-related genes had been reported to map to the same region of 9q.

[0244] Another sequence (Lab Designation 3_{—}2_{—}13-rE (SEQ ID NO:192)) comprises sequence encoding S100 CALCIUM-BINDING PROTEIN A6 (S100A6). This protein is also known as calcyclin. This sequence maps to gene map locus 1q21.

[0245] Calcyclin was originally defined as a cDNA clone (2A9) whose cognate RNA was found to be growth-regulated and whose sequence showed strong similarities to that of the S-100 protein, a calcium-binding protein, as well as to a subunit of the major cellular substrate for tyrosine kinase. Using a full-length cDNA, Ferrari et al. (1987) isolated the entire calcyclin gene plus extensive flanking sequences. They found that the calcyclin gene is present in single copy and has 3 exons. By in situ hybridization, they determined that the CACY gene is located in the 1q21-q25 segment. By linkage studies of interspecific backcrosses of Mus spretus and Mus musculus domesticus, Seldin (1989) demonstrated that the Cacy gene is located on mouse chromosome 3. Using cDNA probes for CACY, van Heyningen et al. (1989) and Dorin et al. (1990) showed that the gene cosegregates with CAGA (S100A8; 123885) and CAGB (S100A9; 123886), which are located on 1q12-q21.

[0246] In the course of constructing a physical map of human 1q21-q23, Oakey et al. (1992) determined that the CACY gene is located at the centromeric end of that segment, proximal to SPTA1 (182860).

[0247] Schafer et al. (1995) isolated a YAC from 1q21 on which 9 different genes coding for S100 calcium-binding proteins could be localized. The clustered organization of S100 genes allowed introduction of a new logical nomenclature based on their physical arrangement on the chromosome with S100A1 (176940) being closest to the telomere and S100A9 being closest to the centromere. In the new nomenclature, CACY became S100A6.

[0248] RhoGEFs play an important role in various signaling cascades and are implicated in human conditions like cancer and mental retardation (Thiesen et al. “Isolation of two novel human RhoGEFs, ARHGEF3 and ARHGEF4, in 3p13-21 and 2q22” Biochem Biophys Res Commun, 273(1):364-9, Jun. 24, 2000). A database search combined with screening of a human neuronal teratocarcinoma library identified two novel RhoGEFs, ARHGEF3 and ARHGEF4 (HGMW-approved symbols). The widely expressed ARHGEF3 transcript of 3561 nucleotides encodes a polypeptide of 526 amino acids with homology to NET1. The ARHGEF4 gene generates two transcripts of 3665 and 4000 nucleotides that translate into 720 amino acid residues. Expression of ARHGEF4 is restricted to brain and the encoded protein shows homology to collybistin. FISH analysis of genomic clones mapped ARHGEF3 to 3p13-21 and ARHGEF4 to 2q22. Copyright 2000 Academic Press.

[0249] Another sequence (Lab Designation 49_RA2_A-rE (SEQ ID NO: 311)) comprises sequence encoding HETEROGENEOUS NUCLEAR RIBOPROTEIN L; HNRPL

[0250] Heterogeneous nuclear ribonucleoprotein (hnRNP) complexes are the structures that contain hnRNAs and their associated proteins. The hnRNPs are directly involved in mRNA synthesis and maturation. Their protein content consists of 2 principal categories: a family of 3 related major species with common structural features, the so-called A1-A2, B1-B2, C1-C2 core proteins, and a more heterogeneous population of polypeptides designated D to U. There are over 20 different major polypeptides in the molecular mass range of 34,000 to 120,000 Da that are associated with the hnRNA in HeLa cells. Among these is a set of 2 distinct, approximately 68-kD proteins, designated L (HNRPL) and M. By UV crosslinking proteins to RNA and by sedimentation analysis before and after RNase digestion, Pinol-Roma et al. (1989) demonstrated with a monoclonal antibody against HNRPL that HNRPL is stably associated with hnRNP complexes. They also showed that HNRPL is present in the nucleoplasm, in 1 to 3 unidentified discrete nonnucleolar structures, and outside hnRNP complexes. The authors detected HNRPL in various vertebrates and found that HNRPL is associated with most nascent transcripts on the lampbrush chromosomes of the newt N. viridescens. Pinol-Roma et al. (1989) screened a HeLa cell cDNA expression library with serum containing antibodies against hnRNPs and isolated a cDNA encoding HNRPL. Northern blot analysis detected an approximately 2.3-kb HNRPL transcript in HeLa cells. The predicted 558-amino acid protein is glycine- and proline-rich and has a calculated molecular weight of 60,187 Da. HNRPL contains 2 segments of approximately 80 amino acids each that are weakly related to each other and to the ribonucleoprotein consensus sequence-type RNA-binding domains of other hnRNP and snRNP proteins.

[0251] Another sequence (Lab Designation 6B37H_T7 (SEQ ID NO:65)) comprises sequence encoding ANNEXIN A1 (ANXA1). This protein is also known as ANNEXIN I (ANX1), LIPOCORTIN I (LPC1) and CALPACTIN II. This sequence maps to Gene map locus 9q11-q22.

[0252] The antiinflammatory action of glucocorticoids has been attributed to the induction of a group of proteins, collectively called lipocortin, that inhibit phospholipase A2. These proteins are thought to control the biosynthesis of potent mediators of inflammation, prostaglandins and leukotrienes, by inhibiting release of their common precursor, arachidonic acid, a process that requires hydrolysis of phospholipids by phospholipase A2. Lipocortin-like proteins have been isolated from monocytes, neutrophils, renal medullary cells, and other cell types. The predominant active form has an apparent relative molecular mass of 40,000. Partially purified lipocortin mimics the effect of steroids and mediates antiinflammatory activity in various in vivo model systems. Using amino acid sequence information from purified rat lipocortin, Wallner et al. (1986) cloned cDNA for human lipocortin and expressed the gene in E. coli. They confirmed that LPC is a potent inhibitor of phospholipase A2. Lipocortin I belongs to the family of annexins, which are structurally related proteins that have a molecular mass of approximately 35,000 to 40,000. They undergo Ca(2+)-dependent binding to phospholipids that are preferentially located on the cytosolic face of the plasma membrane. The individual proteins in this family have been discovered by investigators with various goals in mind and have been given a variety of names (Kaplan et al., 1988).

[0253] Crompton et al. (1988) reviewed the lipocortin/calpactin family of proteins. Pepinsky et al. (1988) described the characteristics of 3 proteins they called lipocortin III, lipocortin V, and lipocortin VI. Lipocortins III and IV are apparently identical. Shohat et al. (1989) advanced the hypothesis that familial Mediterranean fever (FMF; 249100) patients are homozygous for a mutant allele for one of the lipocortin genes.

[0254] Walther et al. (2000) showed that ANXA1 acts through the formyl peptide receptor (FPR; 136537) on human neutrophils. Peptides derived from the unique N-terminal domain of ANXA1 serve as FPR ligands and trigger different signaling pathways in a dose-dependent manner. Lower peptide concentrations possibly found in inflammatory situations elicit Ca(2+) transients without fully activating the mitogen-activated protein kinase pathway. This causes a specific inhibition of the transendothelial migration of neutrophils and a desensitization of neutrophils toward a chemoattractant challenge. These findings identified ANXA1 peptides as novel, endogenous FPR ligands and established a mechanistic basis of ANXA1-mediated antiinflammatory effects.

[0255] Huebner et al. (1987, 1988) mapped the ANXA1 gene to 9q11-q22 by chromosomal in situ hybridization and segregation analysis in somatic cell hybrids using a cDNA clone.

[0256] Horlick et al. (1991) isolated overlapping mouse genomic clones for Lipo1. The gene in the mouse spans about 17 kb and is divided into 13 exons encoding a protein of 346 amino acid residues. By analysis of recombinant inbred strains, they showed that Lipo1 is located on chromosome 19. Horlick et al. (1991) pointed out a similarity in gene structure between mouse Lipo1 and Lipo2, suggesting that they have a recent evolutionary ancestor.

[0257] Another sequence (Lab Designation 6B60_Lac (SEQ ID NO:237)) comprises sequence encoding TROPOMYOSIN 1 (TPM1). This protein is also known as TROPOMYOSIN, SKELETAL MUSCLE ALPHA (TMSA). This sequence maps to gene map locus 15q22.1.

[0258] Tropomyosins are ubiquitous proteins of 35 to 45 kD associated with the actin filaments of myofibrils and stress fibers. In vertebrates, 4 known tropomyosin genes code for diverse isoforms that are expressed in a tissue-specific manner and regulated by an alternative splicing mechanism (Lees-Miller and Helfman, 1991). The vertebrate alpha-tropomyosin gene consists of 15 exons; 5 exons are found in all transcripts, while 10 exons are alternatively used in different alpha-tropomyosin RNAs (Lees-Miller and Helfman, 1991). The striated muscle isoform is expressed in both cardiac and skeletal muscle tissues.

[0259] MacLeod and Gooding (1988) isolated a cDNA clone from a human skeletal muscle library which contains the complete protein-coding sequence of a skeletal muscle alpha-tropomyosin. In cultured human fibroblasts, the TMSA gene was found to encode both skeletal muscle and smooth muscle type of alpha-tropomyosins by using an alternative mRNA-splicing mechanism.

[0260] Eyre et al. (1995) developed a sequence tagged site (STS) for the TPM1 gene and used it to isolate a genomic clone containing part of the gene. Using this clone, they localized TPM1 to 15q22 by fluorescence in situ hybridization. By PCR of radiation hybrids, Tiso et al. (1997) mapped the TPM1 gene more precisely to 15q22.1. Schleef et al. (1993) mapped the mouse homolog, Tpm-1, to the d-se region of chromosome 9, using interspecies backcrosses.

[0261] Brown et al. (2001) described the crystal structure of the tropomyosin molecule. Their results revealed the effects of clusters of core alanines on the axial register, symmetry, and conformational variability of 2-stranded coiled coils that appear to be important for tropomyosin's role in the regulation of muscle contraction.

[0262] To assess linkage between the human TPM1 gene and type 3 familial hypertrophic cardiomyopathy (CMH3; 115196), which had previously been mapped to 15q2, Thierfelder et al. (1994) identified a short tandem repeat polymorphism (STR). A combined maximum 2-point lod score of 6.94 at theta=0.0 was obtained for linkage of the TPM1 marker to CMH3 in 2 families. A point mutation was identified in each of the 2 families used in the linkage study: asp175-to-asn (191010.0002) in one, and glu180-to-gly (191010.0001) in the other. Watkins et al. (1995) concluded that mutations in the TPM1 gene are a rare cause of CMH, accounting for approximately 3% of cases. These mutations, like those in the cardiac troponin T gene (TNNT2; 191045), are characterized by relatively mild and sometimes subclinical hypertrophy but a high incidence of sudden death. Genetic testing may therefore be especially important in this group.

[0263] Blanchard et al. (1997) used gene targeting in embryonic stem cells and blastocyst-mediated transgenesis to create functional mouse alpha-tropomyosin knockouts. Homozygous mice died in utero between embryonic days 9.5 and 13.5 and lacked alpha-tropomyosin mRNA. Heterozygotes had an approximately 50% reduction in alpha-tropomyosin mRNA levels but no reduction in alpha-tropomyosin protein. No differences in myofibrillar ultrastructure or contractile function were found. The authors postulated that mice have a regulatory mechanism that maintains the level of myofibrillar tropomyosin despite a reduction in mRNA. Furthermore, they concluded that, assuming human and mouse cardiac muscle are similar, simple haploinsufficiency for alpha-tropomyosin would not cause the pathologic changes seen in human type 3 hypertrophic cardiomyopathy (115196) and that alterations in protein stoichiometry may produce a poison polypeptide that disrupts myofibrillar organization on incorporation into the sarcomere.

[0264] Muthuchamy et al. (1999) constructed a transgenic mouse model of CMH3 by introducing the missense mutation asp 175 to asn (191010.0002) by site-directed mutagenesis. This mutation occurs in a cardiac troponin T-binding region. The transgenic CMH3 mice exhibited significant in vivo and in vitro evidence of myocardial functional impairment. Histologic analysis of transgenic myocardium showed variable myocyte disarray and hypertrophy, as reported in the human form of the disease.

### Allelic Variants

[0265] 0.0001 CARDIOMYOPATHY, FAMILIAL HYPERTROPHIC, 3 [TPM1, GLU180GLY] In members of family MZ afflicted with a form of familial hypertrophic cardiomyopathy linked to 15q (115196), Thierfelder et al. (1994) identified an A-to-G transition at nucleotide 595 in exon 5 of the TPM1 gene in heterozygous state. The substitution changed codon 180 from GAG to GGG and predicted that a negatively charged glutamic acid residue is replaced by a neutral glycine residue.

[0266] 0.0002 CARDIOMYOPATHY, FAMILIAL HYPERTROPHIC, 3 [TPM1, ASP175ASN] In members of family MI afflicted with a form of familial hypertrophic cardiomyopathy linked to 15q (115196), Thierfelder et al. (1994) found heterozygosity for a G-to-A transition at nucleotide 579 that altered codon 175 from GAC to AAC. The substitution predicted that the mutated allele present in affected individuals would encode a neutral asparagine residue instead of the negatively charged aspartic acid residue found in unaffected individuals.

[0267] Watkins et al. (1995) investigated whether the D175N mutation was really responsible for hypertrophic cardiomyopathy or was only a polymorphism, because some features of the 2 identified mutations in the alpha-tropomyosin gene contrasted with those of mutations in other disease genes for CMH. Unlike the beta-cardiac myosin heavy chain gene (MYH7; 160760) and the cardiac troponin-T gene, the alpha-tropomyosin gene is expressed ubiquitously, yet the disease phenotype is limited to cardiac muscle. Watkins et al. (1995) found that the asp175-to-asn missense mutation was present in the proband and 2 affected offspring, but in none of the proband's 3 sibs. Although both parents were deceased, the haplotypes of the 4 parental chromosomes could be reconstructed. (The haplotypes made use of an intragenic polymorphism in 10 flanking polymorphisms spanning a region of 35 cM.) One parental chromosome was transmitted to 2 offspring: 1 bearing the asp175-to-asn mutation (the affected proband) and 1 clinically unaffected sib who lacked the TPM1 mutation. Thus the asp175-to-asn mutation must have arisen de novo.

[0268] 0.0003 CARDIOMYOPATHY, FAMILIAL HYPERTROPHIC, 3 [TPM1, VAL95ALA] Karibe et al. (2001) described a large Spanish-American family with multiple members affected with hypertrophic cardiomyopathy (115196). They found a novel val95-to-ala (V95A) mutation in TPM1 to segregate with the disease phenotype. This mutation was associated with the same mild degree of left ventricular hypertrophy as seen in some CMH1 families haboring specific mutations in MYH7 (160760.0010, 160760.0012, 160760.0001). Penetrance was estimated at 53% on the basis of an abnormal echocardiogram; however, 2 mutation carriers with normal echocardiograms and normal ECGs were only in their mid-30s at the time of the study. Penetrance could not be accurately assessed by ECG, since 6 older mutation-negative family members had minor T-wave changes. Cumulative survival rates in this family were 73%+/−10% at 40 years and 32%+/−13% at 60 years. Expression of mutant and control tropomyosin in a bacterial system allowed a functional assessment of this mutation. An increase in calcium binding and abnormal myosin cycling were observed; both were felt to be important contributors to disease pathogenesis.

[0269] Another sequence (Lab Designation 6b3_rE (SEQ ID NO: 1) comprises sequence encoding ATPase, H+ TRANSPORTING, LYSOSOMAL (ATP6L)

[0270] This protein is also known as ATPase, H+ TRANSPORTING, LYSOSOMAL, 16-KD This sequence maps to gene map locus 16p13.3.

[0271] In an attempt to isolate candidate genes for autosomal dominant polycystic kidney disease (173900), Gillespie et al. (1991) identified a number of CpG-rich islands from 16p13.3, the region defined genetically as containing the site of PKD1 (601313) mutations. Genomic fragments adjacent to one of these islands were used to isolate cDNAs from both HeLa cells and cultured cystic epithelium that encode a 155-amino acid peptide having 4 putative transmembrane domains. The corresponding transcript was found in all tissues tested but was most abundant in brain and kidney. The deduced amino acid sequence had 93% similarity to the 16-kD proteolipid component that is believed to be part of the proton channel of the vacuolar H(+)-ATPase. A mutated proton channel might be implicated in the pathogenesis of cystic disease. However, sequencing of cDNAs corresponding to both alleles of an affected person revealed no differences in the deduced amino acid sequence. Moreover, transcript size and abundance were not altered in cystic kidney.

[0272] Note: ABCR is a rearranged gene that is not expressed in our cell line—in the mouse, this gene sits next to Char4: P. chabaudi malaria resistance QTL 4—as well as several genes of unknown function. Murine chromosome 3 60.81-61.19 cM is the closest rodent markers. Human genes that reside next door are PARG1; LOC163462; and loc163463.

[0273] Another sequence (Lab Designation 6BE72_rE (SEQ ID NO: 2)) comprises sequence encoding CCCTC-BINDING FACTOR (CTCF). This protein is also known as TRANSCRIPTIONAL REPRESSOR CTCF.

[0274] Filippova et al. (1996) isolated and analyzed human CTCF (CCCTC-binding factor) cDNA clones. They showed that the human CTCF protein contains 11 zinc finger domains and is exceptionally highly conserved, sharing 93% identity with the avian CTCF amino acid sequence. It binds specifically to regulatory sequences in the promoter-proximal regions of chicken, mouse, and human MYC (190080) oncogenes. CTCF contains 2 transcription repressor domains transferable to a heterologous DNA-binding domain. One CTCF-binding site, conserved in mouse and human MYC genes, is found immediately downstream of the major P2 promoter. Gel shift assays of nuclear extracts from mouse and human cells showed that CTCF is the predominant factor binding to this sequence. Mutational analysis of the P2-proximal CTCF-binding site and transient cotransfection experiments demonstrated that CTCF is a transcriptional repressor of the human MYC gene. Although there is 100% sequence identity in the DNA-binding domains of the avian and human CTCF proteins, the regulatory sequences recognized by CTCF in chicken and human MYC promoters are clearly diverged. Mutating the contact nucleotides confirmed that CTCF binding to the P2 promoter of the human MYC gene requires a number of unique contact DNA bases that are absent in the CTCF-binding site of the chicken MYC gene. Moreover, proteolytic protection assays indicated that several more CTCF zinc fingers are involved in contacting the human CTCF-binding site than the chicken site. Gel shift assays utilizing successively deleted zinc finger domains indicated that CTCF zinc fingers 2 to 7 are involved in binding to the chicken MYC promoter, while fingers 3 to 11 mediate CTCF binding to the human promoter. This flexibility in zinc finger usage reveals CTCF to be a ‘multivalent’ transcription factor. Northern blot analysis revealed that the human CTCF gene is ubiquitously expressed as an approximately 4-kb transcript.

[0275] Bell et al. (1999) identified a 42-bp DNA fragment of the chicken beta-globin insulator that is both necessary and sufficient for enhancer-blocking activity in human cells. They showed that this sequence, FII, is the binding site for CTCF, and these CTCF-binding sites were present in all of the vertebrate enhancer-blocking elements examined. Bell et al. (1999) suggested that directional enhancer blocking by CTCF is a conserved component of gene regulation in vertebrates.

[0276] Bell and Felsenfeld (2000) and Hark et al. (2000) independently showed that CTCF binds to several sites within the unmethylated imprinted-control region (ICR) between H19 (103280) and IGF2 (147470) that are essential for enhancer blocking. Hark et al. (2000) demonstrated that CTCF binding is abolished by DNA methylation of the ICR. Methylation of the CpGs within the CTCF binding sites eliminates binding of CTCF in vitro, and deletion of these sites results in loss of enhancer-blocking activity in vivo, thereby allowing gene expression. This CTCF-dependent enhancer-blocking element acts as an insulator. Bell and Felsenfeld (2000) suggested that it controls imprinting of IGF2 and that activity of this insulator is restricted to the maternal allele by specific DNA methylation of the paternal allele. Bell and Felsenfeld (2000) concluded that DNA methylation can control gene expression by modulating enhancer access to the gene promoter through regulation of an enhancer boundary.

[0277] An expansion of a CTG repeat at the DM1 locus causes myotonic dystrophy by altering the expression of 2 adjacent genes, DMPK (605377) and SIX5 (600963) and through a toxic effect of the repeat-containing RNA. Filippova et al. (2001) identified 2 CTCF binding sites that flank the CTG repeat and form an insulator element between DMPK and SIX5. Methylation of these sites prevents binding of CTCF, indicating that the DM1 locus methylation in congenital myotonic dystrophy would disrupt insulator function. Furthermore, CTCF binding sites are associated with CTG/CAG repeats at several other loci. Filippova et al. (2001) suggested a general role for CTG/CAG repeats as components of insulator elements at multiple sites in the human genome.

[0278] Chao et al. (2002) identified the insulator and transcription factor CTCF as a candidate trans-acting factor for X chromosome selection in mouse. The choice/imprinting center contains tandem CTCF binding sites that function in an enhancer-blocking assay. In vitro binding is reduced by CpG methylation and abolished by including non-CpG methylation. Chao et al. (2002) postulated that Tsix (300181) and CTCF together establish a regulatable epigenetic switch for X inactivation. Murine Tsix contains greater than 40 CTCF motifs and the human sequence has greater than 10. Dot-plot analysis indicated a contiguous head-to-tail arrangement of highly homologous DXPas34 repeats.

[0279] Another sequence (Lab Designation 7A10_{—}1-rE (SEQ ID NO: 41)) comprises sequence encoding DELETED IN AZOOSPERMIA-LIKE (DAZL). This protein is also known as DAZLA or DELETED IN AZOOSPERMIA HOMOLOG or DAZH or SPGYLA. This sequence maps to gene map locus 3p24. This gene was disrupted off the negative strand utilizing the methods of the present invention.

[0280] It is widely believed that most or all Y-chromosomal genes were once shared with the X chromosome. The DAZ gene (400003), so named for ‘deleted in azoospermia,’ is a candidate for AZF, the human Y-chromosomal azoospermia factor (415000). Saxena et al. (1996) reported multiple copies of DAZ (more than 99% identical in DNA sequence) clustered in the AZF region and a functional DAZ homolog (symbolized DAZH by them) on human chromosome 3. The entire gene family appeared to be expressed in germ cells. Sequence analysis indicated that the Y-chromosomal DAZ cluster arose during primate evolution by (1) transposition of the autosomal gene to the Y; (2) amplification and pruning of exons within the transposed gene; and (3) amplification of the modified gene. Saxena et al. (1996) stated that these results challenged prevailing views of sex chromosome evolution, suggesting that acquisition of autosomal fertility genes was an important process in Y chromosome evolution. By fluorescence in situ hybridization (FISH) and positioning on the radiation hybrid map of the human genome, Saxena et al. (1996) mapped the DAZH gene to 3p24. Saxena et al. (1996) suggested that DAZH is the founding member of the DAZ gene family.

[0281] Shan et al. (1996) cloned a human autosomal gene homologous to the DAZ gene by screening different testis libraries with the cDNA probe SPGY1. The gene, designated SPGYLA by them, was mapped to chromosome 3 by FISH. Shan et al. (1996) reported that comparison of the SPGYLA cDNA sequence with the cDNA sequences of DAZ and SPGY1 revealed 2 prominent differences. The tandem repetitive structure of 72-bp sequence units (DAZ repeats) is absent in SPGYLA, as SPGYLA contains only 1 72-bp sequence subunit. Downstream of this subunit a specific 130-bp sequence domain is present which is also present in the mouse Dazla gene (encoded on mouse chromosome 17) and in the Drosophila gene ‘boule’ but absent from DAZ. Shan et al. (1996) demonstrated that SPGYLA encodes an RNA-binding protein that is expressed only in the male gonad.

[0282] Yen et al. (1996) reported the isolation of a human gene homolog of the mouse Dazla gene by screening of a testis-specific library with a DAZ cDNA clone. The gene they isolated contained only 1 of 7 repeats found in DAZ, showed a high degree of homology to the mouse Dazla gene, and mapped to chromosome 3p24.

[0283] RBM and DAZ/SPGY are 2 families of genes located on the Y chromosome that encode proteins containing RNA-binding motifs, and both have been described as candidate human spermatogenesis genes. Neither gene family had been shown to be essential for spermatogenesis in human males, but a Dazla homolog in Drosophila is essential for spermatogenesis (Eberhart et al., 1996). With a polyclonal antibody raised in rabbits against Dazla and with knockout technology in mice, Rugglu et al. (1997) demonstrated that the Dazla protein is cytoplasmic in male and female germ cells, unlike the nuclear RBM protein. Disruption of the Dazla gene led to loss of germ cells and complete absence of gamete production, demonstrating that Dazla is essential for the differentiation of germ cells.

[0284] By a comparison of autosomal DAZLA and Y-linked DAZ intron sequences, Agulnik et al. (1998) derived a new figure for the ratio of male-to-male mutation rates; they found that alpha(m)=4.

[0285] The single-copy gene DAZL1 on chromosome 3 encodes a testis-specific protein with RNA-binding potential. Y-chromosomal DAZ homologs are confined to humans and higher primates. To investigate the function unique to higher primate spermatogenesis that DAZ may serve and to assess the functional status of the gene by determining the extent of functional conservation, Slee et al. (1999) tested the capacity of the human DAZ gene contained in a 225-kb YAC to complement the sterile phenotype of the Dazl null mouse, which is characterized by severe germ cell depletion and meiotic failure. Although Dazl −/− mice remained infertile when the DAZ transgene was introduced, histologic examination revealed a partial and variable rescue of the mutant phenotype, manifest as a pronounced increase in the germ cell population of the seminiferous tubules and survival to the pachytene stage of meiosis. As well as constituting definitive proof of the spermatogenic role of the DAZ gene product, these findings confirmed the high degree of functional conservation between the DAZ and DAZL1 genes, suggesting they may constitute a single target for contraceptive intervention and raising the possibility of therapeutic upregulation of the DAZL1 gene in infertile men.

[0286] Another sequence (Lab Designation 7A10_{—}1-rE (SEQ ID NO: 41)) comprises sequence encoding ANNEXIN A2 (ANXA2). This protein is also known ANNEXIN II (ANX2), LIPOCORTIN II; LPC2; LIP2, ANNEXIN II PSEUDOGENE 1, INCLUDED, ANX2P1, INCLUDED ANX2P2, INCLUDED ANX2P3, INCLUDED. This sequence maps to gene map locus 15q21-q22.

[0287] Annexin II, a major cellular substrate of the tyrosine kinase encoded by the SRC oncogene (190090), belongs to the annexin family of Ca(2+)-dependent phospholipid- and membrane-binding proteins. By screening a cDNA expression library generated from highly purified human osteoclast-like multinuclear cells (MNC) formed in long-term bone marrow cultures, Takahashi et al. (1994) identified a candidate clone that stimulated MNC formation. Sequence analysis showed that this cDNA encoded annexin II. Further studies yielded results suggesting that ANX2 is an autocrine factor that enhances osteoclast formation and bone resorption, a previously unknown function for this molecule.

[0288] Spano et al. (1990) isolated and characterized human genomic clones of the gene encoding lipocortin II (LIP2) and of 3 pseudogenes. The LIP2 gene is at least 40 kb long and consists of 13 exons. The 3 pseudogenes show typical features of retroposons. Spano et al. (1990) reported experiments which, together with the data published by Huebner et al. (1988), led them to conclude that the LIP2 gene is located on chromosome 15. The 3 pseudogenes were assigned to chromosomes 4, 9 and 10. The coexistence on chromosome 9 of the LIP1 gene (151690) and a LIP pseudogene was considered fortuitous. Richard et al. (1994) presented an integration of the physical, expression, and genetic maps of human chromosome 15. They placed the ANXA2 gene in their region IV, i.e., 15q21-q22, thus confirming the previous localization.

[0289] PSEUDOGENES By use of cDNAs in somatic cell hybrid analysis and in situ hybridization, Huebner et al. (1987, 1988) mapped the LPC2A (LIP2P1) locus to 4q21-q31. Spano et al. (1990) presented evidence that the lipocortin II-like gene that maps to chromosome 4 is a pseudogene (ANX2P1) with typical features of a retroposon.

[0290] By means of a lipocortin cDNA in somatic cell hybrid analysis and in situ chromosome hybridization, Huebner et al. (1987, 1988) mapped LPC2B to chromosome 9. Thus, LPC1 and LPC2B are syntenic. LPC2B is located proximal to ABL (189980). Calpactin I is a synonym for lipocortin II. Spano et al. (1990) presented evidence that the lipocortin II-like gene that maps to chromosome 9 is a pseudogene (ANX2P2) with features typical of a retroposon. The Genome Database (GDB) gave the regional location as 9p13.

[0291] Huebner et al. (1987, 1988) mapped the lipocortin IIC (LPC2C) gene to 10q21-q22. According to Spano et al. (1990), the lipocortin II-like gene that maps to chromosome 10 is a pseudogene (ANX2P3) with the structure of a retroposon which is related to the functional lipocortin II gene located on chromosome 15.

[0292] Another sequence (Lab Designation 10_{—}46_{—}4-Lac (SEQ ID NO: 214)) comprises sequence encoding DNAJ, E. COLI, HOMOLOG OF, SUBFAMILY A, MEMBER 1; DNAJA1. This protein is also known as HEAT-SHOCK PROTEIN, DNAJ-LIKE 2; HSJ2 HEAT-SHOCK 40-KD PROTEIN 4; HSPF4,HDJ2 and HSDJ. Dnaja1 overlaps two other genes: LOC158188 and LOC158187. The gene dnaj1 is also disrupted in present invention. Dnaja1 is off the negative strand.

[0293] The E. coli heat-shock protein DNAJ has been implicated in protein folding, proteolysis, phosphorylation, and replication of phage. By screening a human umbilical vein endothelial cell cDNA expression library with a monoclonal antibody that reacts specifically with human endothelial cells and monocytes, Chellaiah et al. (1993) isolated cDNAs encoding HSJ2, which they named HDJ2. The predicted 397-amino acid HSJ2 protein is 32% identical to DNAJ, with the highest identity in the N-terminal region. Among the known DNAJ homologs in S. cerevisiae, HSJ2 is most identical to YDJ1, which may be involved in the transport of certain proteins into the mitochondria and endoplasmic reticulum.

[0294] Another sequence (Lab Designation 12_{—}3B#2_Lac (SEQ ID NO: 218)) comprises JWA which, on the negative strand is next to: UBE1C: ubiquitin-activating enzyme E1C (UBA3 homolog, yeast). Subunit of E1 (ubiquitin-activating enzyme)-like complex; activates NEDD8 and targets Hs-cullin-4A (Cu14A) for degradation ecursor protein-binding protein-1) can bind to NEDD8 in rabbit reticulocyte lysates. However, since APP-BP1 shows similarity to only the N-terminal domain of an E1 enzyme, the authors reasoned that it must interact with a protein showing similarity to the C-terminal region of E1s. By searching sequence databases, Osaka et al. (1998) identified cDNAs encoding UBA3, the human homolog of yeast Uba3. The predicted 442-amino acid UBA3 protein shares 43% sequence identity with yeast Uba3. In vitro, UBA3 formed a complex with APP-BP1 and a thioester linkage with NEDD8. Osaka et al. (1998) suggested that the APP-BP1/UBA3 complex functions as an E1-like enzyme for the activation of NEDD8.

[0295] Another sequence (Lab Designation 12_{—}3B#8-rE (SEQ ID NO: 107)) comprises sequence encoding APRATAXIN (APTX). This protein is also known as FLJ20157 This sequence maps to gene map locus 9p13.3.

[0296] The APTX gene encodes a member of the histidine triad (HIT) superfamily, to which have been attributed nucleotide-binding and diadenosine polyphosphate hydrolase activities. The APTX gene is mutant in ataxia-ocular apraxia (208920).

[0297] Early-onset ataxia with oculomotor apraxia, the ataxia-oculomotor apraxia syndrome (208920), maps to 9p13. Date et al. (2001) identified a group of Japanese patients whose clinical presentation was characterized by autosomal recessive inheritance, early age of onset, Friedreich ataxia (FRDA; 229300)-like clinical presentations, and hypoalbuminemia. Linkage to the FRDA locus was excluded. They confirmed that the disorder in these patients linked to the same locus, 9p13, as the ataxia-oculomotor apraxia syndrome. They narrowed the candidate region and identified a novel gene encoding a member of the histidine triad superfamily as the causative gene. They called its product aprataxin, with the gene symbol APTX. Although many HIT proteins had been identified (e.g., FHIT, 601153; HINT, 601314), aprataxin was the first to be linked to a distinct phenotype.

[0298] By homozygosity mapping and study of Portuguese and Japanese founder haplotypes, Moreira et al. (2001) localized the gene mutant in ataxia-oculomotor apraxia syndrome to a 2-cM interval on 9p13.3. They reduced the critical interval to a 300-kb region and identified mutations in the APRX gene, which had been identified as FLJ20157 (GenBank AK000164).

### Expression of Alternative Transcripts

[0299] Moreira et al. (2001) identified 2 major mRNA species of APTX resulting from alternative splicing of exon 3: a short form of 168 amino acids and the first ATG codon in exon 3, and a long form with an additional 115 nucleotides of the 5-prime portion of exon 3, resulting in the addition of another 174 amino acids and the first codon ATG codon in exon 1. Moreira et al. (2001) and Date et al. (2001) numbered mutations according to both the long and short forms of the transcript.

[0300] Moreira et al. (2001) demonstrated by RT-PCR that the APTX gene is ubiquitously expressed. The long transcript is the major form found in human cell lines, with the shorter frame-shifted form present in lower amounts; liver tissue has equal amounts of the 2 transcripts. By Northern blot analysis, Date et al. (2001) demonstrated ubiquitous expression of the 2.2-kb long form and limited expression of the 1.35-kb short form.

[0301] Date et al. (2001) showed by homology search that both forms of aprataxin have a highly conserved HIT motif (His-X-His-X-His-X-X, where X is a hydrophobic amino acid), an essential motif for HIT proteins. HIT proteins have been classified into 2 branches: the fragile HIT protein family found only in animals and fungi, and the ancient HIT nucleotide-binding protein (HINT) family that has representatives in all cellular life. Phylogenetic tree analysis showed that aprataxin is the third member of the HIT protein superfamily. The mutations found in patients with early-onset ataxia with oculomotor apraxia and hypoalbuminemia involved highly conserved amino acids.

[0302] Date et al. (2001) and Moreira et al. (2001) identified mutations in the APRX gene as the cause of ataxia-oculomotor apraxia. Date et al. (2001) observed that an insertion or deletion mutation resulted in a severe phenotype with childhood onset, whereas missense mutations resulted in a mild phenotype with relatively late age of onset; in their pedigree 2637 with compound heterozygosity for val89-to-gly (606350.0004) and pro32-to-leu (606350.0002), the age of onset was 25 years.

[0303] 0.0001 ATAXIA, EARLY-ONSET, WITH OCULOMOTOR APRAXIA AND HYPOALBUMINEMIA [APTX, 1-BP INS, 167T] Date et al. (2001) found that affected individuals in 3 pedigrees with EAOH (208920) carried a homozygous insertion of a T after nucleotide 167 (167delT; nucleotide number starting at the first ATG codon of the short form), which results in a frameshift with a premature stop. Affected individuals in these 3 families were homozygous; in 3 other pedigrees affected members had this mutation in heterozygous state in combination with a different mutation. Among their patients, Moreira et al. (2001) found that the Japanese founding haplotypes were associated with the same mutation, which they called 689insT according to the gene's long transcript.

[0304] 0.0002 ATAXIA, EARLY-ONSET, WITH OCULOMOTOR APRAXIA AND HYPOALBUMINEMIA [APTX, PRO32LEU] The second most common mutation found by Date et al. (2001) in families with EAOH (208920) was a C-to-T transition resulting in a pro32-to-leu amino acid change. This mutation removes a proline residue that is highly conserved among all the subfamilies of HIT proteins. Moreira et al. (2001) designated this mutation PRO206LEU according to the APTX gene's long transcript.

[0305] 0.0003 ATAXIA, EARLY-ONSET, WITH OCULOMOTOR APRAXIA AND HYPOALBUMINEMIA [APTX, 1-BP DEL, 318T] In one pedigree, Date et al. (2001) observed that members with EAOH (208920) were homozygous for a 318delT single-nucleotide deletion resulting in a frameshift with a premature stop. In 3 pedigrees, the 167insT (606350.0001), P32L (606350.0002), and 318delT mutations were present in compound heterozygous state.

[0306] 0.0004 ATAXIA, EARLY-ONSET, WITH OCULOMOTOR APRAXIA AND HYPOALBUMINEMIA [APTX, VAL89GLY] In a family with EAOH (208920), Date et al. (2001) observed that affected members had a val89-to-gly (V89G) missense mutation involving one of the highly conserved hydrophobic amino acids of the histidine triad. As the HIT motif forms part of the phosphate binding loop, the V89G mutation probably affects the phosphate-binding activity.

[0307] Another sequence (Lab Designation L195B1E_rE (SEQ ID NO: 138) comprises sequence encoding GENERAL TRANSCRIPTION FACTOR IIE, POLYPEPTIDE 1 (GTF2E1).

[0308] Initiation of transcription from eukaryotic protein-coding genes is a complex process requiring RNA polymerase II (PolII; see 180660) and a cadre of transcription factors. These factors can be divided into 2 classes on the basis of their function: the general factors that are required for transcription of all PolII genes, and sequence-specific factors that are required for regulating expression. The general transcription factors and PolII form a specific multiprotein complex near the transcription start site by interacting with core promoter elements. The most common core element is the TATA box, typically located 25-30 bp upstream of the transcriptional start site or initiator element. Sequence-specific transcription factors that bind to DNA-sequence elements located proximal and distal to the core promoter elements can dramatically enhance or repress transcription. The general transcription factors that have been identified are TFIIA, TFIIB (189963), TFIID (313650), TFIIE (see also 189964), TFIIF (189968, 189969), TFIIG/J, and Levi (189972). Human TFIIE consists of 2 subunits of relative molecular masses 56,000 and 34,000. The structure of TFIIE appears to be a heterotetramer of 2 alpha and 2 beta subunits, both subunits being required for optimal reconstituted basal-level transcription. Peterson et al. (1991) isolated human cDNA clones for both subunits of the general transcription factor IIE. Using purified recombinant proteins they found that both subunits are essential to form a stable preinitiation complex and to reconstitute basal-level and Sp1-activated (189906) transcription in vitro. Ohkuma et al. (1991) also cloned the TF2E1 gene and pointed to sequence similarities to bacterial sigma factors, suggesting a direct involvement in the regulation of transcription initiation.

[0309] High levels of gene transcription by RNA polymerase II depend on high rates of transcription initiation and reinitiation. Initiation requires recruitment of the complete transcription machinery to a promoter, a process facilitated by activators and chromatin remodeling factors. Reinitiation is thought to occur through a different pathway. After initiation, a subset of the transcription machinery remains at the promoter, forming a platform for assembly of a second transcription complex. Yudkovsky et al. (2000) described the isolation of a reinitiation intermediate in yeast that includes transcription factors TFIID, TFIIA (see 600520), TFIIH, TFIIE, and Mediator (see 602984). This intermediate can act as a scaffold for formation of a functional reinitiation complex. Formation of this scaffold is dependent on ATP and TFIIH. In yeast, the scaffold is stabilized in the presence of the activator Gal4-VP16, but not Gal4-AH, suggesting a new role for some activators and Mediator in promoting high levels of transcription.

[0310] Another sequence Lab Designation est_L24_{—}5_{—}3BE_rEa (SEQ ID NO: 359)) comprises sequence encoding TUSP. This sequence maps to gene map locus 6q25-q26.

[0311] The mutated gene responsible for the tubby obesity phenotype has been identified by positional cloning (Kleyn et al. “Identification and characterization of the mouse obesity gene tubby: a member of a novel gene family” Cell 85(2):281-90 Apr. 19, 1996). A single base change within a splice donor site results in the incorrect retention of a single intron in the mature tub mRNA transcript. The consequence of this mutation is the substitution of the carboxy-terminal 44 amino acids with 24 intron-encoded amino acids. The normal transcript appears to be abundantly expressed in the hypothalamus, a region of the brain involved in body weight regulation. Variation in the relative abundance of alternative splice products is observed between inbred mouse strains and appears to correlate with an intron length polymorphism. This allele of tub is a candidate for a previously reported diet-induced obesity quantitative trait locus on mouse chromosome 7.

[0312] Another sequence (Lab Designation L191B2E#1 (SEQ ID NO: 85)) comprises sequence encoding REPLICATION PROTEIN A3, 14-KD (RPA3). This protein is also known as RPA14 or REPA3. This sequence maps to gene map locus 7p22.

[0313] Umbricht et al. (1993) cloned the 14-kD subunit of human RPA from a HeLa cell cDNA library. The RPA3 gene was found to have a 692-basepair sequence with an open reading frame encoding a protein of 121 amino acids. The deduced amino acid sequence showed only limited similarity to the small subunit of yeast RPA. Using PCR amplification of genomic DNA from rodent-human hybrid cell lines, Umbricht et al. (1993) mapped the human REPA3 gene to chromosome 7. By Southern analysis and PCR amplification of somatic cell hybrids of chromosome 7, as well as by fluorescence in situ hybridization, Umbricht et al. (1994) mapped RPA3 to 7p22. See also RPA1 (179835) and RPA2 (179836).

[0314] Another sequence comprises sequence encoding REPLICATION PROTEIN A1, 70-KD (RPA1). This protein is also known as RPA70 or REPA1. This sequence maps to gene map locus 17p13.3.

[0315] Replication protein A (RPA) is a 3-subunit single-stranded DNA-binding protein that has been isolated from human cells and found to be essential for in vitro replication of the papovavirus SV40. Erdile et al. (1991) reported the sequence of a cDNA encoding the 70-kD subunit. The human cDNA directed production in E. coli of a 70-kD protein that reacted with a monoclonal antibody directed against the 70-kD subunit of the human protein. The recombinant subunit, purified from bacteria, exhibited single-stranded DNA-binding activity comparable to that of the complete RPA complex. It could substitute for the complete complex in stimulating the activity of DNA polymerase alpha-primase, but could not substitute for the complete complex in SV40 DNA replication in vitro, suggesting an important functional role for the other subunits. Using PCR amplification of genomic DNA from rodent-human cell lines, Umbricht et al. (1993) mapped the gene for the 70-kD subunit to chromosome 17. By the same method, they mapped the genes for the 32-kD (179836) and the 14-kD (179837) subunits to chromosomes 1 and 7, respectively. Using a combination of PCR amplification of somatic cell hybrids and radiation hybrids containing chromosome 17 fragments, Umbricht et al. (1994) mapped RPA1 to 17p13.3.

[0316] Gomes and Wold (1996) constructed a series of N-terminal deletions of RPA70 to explore the function of the protein. Their data indicated that RPA70 is composed of 3 functional domains: an N-terminal domain that is not required for single-stranded DNA binding or SV40 replication, a central DNA-binding domain, and a C-terminal domain that is essential for subunit interactions.

[0317] A growing body of evidence shows that the folding of mRNA influences a diverse range of biologic events such as mRNA splicing and processing, and translational control and regulation. Because the structure of mRNA is determined by its nucleotide sequence and its environment, Shen et al. (1999) examined whether the folding of mRNA could be influenced by the presence of single-nucleotide polymorphisms (SNPs). They reported marked differences in mRNA secondary structure associated with SNPs in the coding region of 2 human mRNAs: alanyl-tRNA synthetase (601065) and replication protein A, 70-kD subunit. Enzymatic probing of SNP-containing fragments of the mRNAs revealed pronounced allelic differences in cleavage pattern at sites 14 or 18 nucleotides away from the SNP, suggesting that a single-nucleotide variation can give rise to different mRNA folds. By using oligodeoxyribonucleotides complementary to the region of different allelic structures in the RPA70 mRNA, but not extending to the SNP itself, they found that the SNP exerted an allele-specific effect on the accessibility of its flanking site in the endogenous human RPA70 mRNA. The results demonstrated the contribution of common genetic variation through structural diversity of mRNA and suggested a broader role than previously thought for the effects of SNPs on mRNA structure and, ultimately, biologic function.

[0318] Nakayama et al. (1999) reported that a −786T-C mutation (163729.0002), in the promoter region of the endothelial nitric oxide synthase (eNOS) gene reduced transcription of the gene and was strongly associated with coronary spastic angina and myocardial infarction. Miyamoto et al. (2000) determined that RPA1 specifically binds to the mutant allele in nuclear extracts from HeLa cells. In human umbilical vein endothelial cells, inhibition of RPA1 expression using antisense oligonucleotides restored transcription driven by the mutated promoter sequence, whereas overexpression of RPA1 further reduced it. Serum nitrite-nitrate levels among individuals carrying the −786T-C mutation were significantly lower than among those without the mutation. The authors concluded that RPA1 apparently functions as a repressor protein in the −786T-C mutation-related reduction of eNOS gene transcription associated with the development of coronary artery disease.

[0319] Another sequence (Lab Designation L192B3E#13_rE (SEQ ID NO: 143) comprises sequence encoding INSULIN-LIKE GROWTH FACTOR 2 RECEPTOR (IGF2R). This protein is also known as INSULIN-LIKE GROWTH FACTOR II, RECEPTOR FOR MANNOSE 6-PHOSPHATE RECEPTOR, CATION-INDEPENDENT, MIPR or CIMPR. This sequence maps to gene map locus 6q26.

[0320] Insulin-like growth factor II (147470) is a polypeptide hormone with structural homologies to insulin and IGF I. Although IGF II can stimulate a broad range of biologic responses in isolated cells, these responses appear to be mediated by the insulin and IGF I receptors (147670, 147370). The receptor for IGF II was found also to be the receptor for mannose 6-phosphate, which is implicated in targeting of lysosomal enzymes (MacDonald et al., 1988; Roth, 1988; Tong et al., 1988). Purified human and rat IGF2 receptors interact with antibodies to the mannose 6-phosphate receptor and with mannose 6-phosphate. Oshima et al. (1988) cloned and sequenced the full-length cDNA for MPRI; 7,473 nucleotides were found to encode a protein of 2,491 amino acids. The amino acid sequence included a putative signal sequence of 40 amino acids and an extra cytoplasmic domain consisting of 15 homologous repeat sequences of 134 to 167 amino acids, a transmembrane region of 23 amino acids, and a cytoplasmic domain of 164 amino acids. The predicted molecular size was greater than 270 kD. On comparison to the reported structure of IGF2R (Morgan et al., 1987), MPR1 was found to show 99.8% identity at the nucleotide level and 99.4% identity at the amino acid level. By cDNA sequencing, Laureys et al. (1988) showed that the cation-independent mannose 6-phosphate receptor and IGF2 receptor are identical.

[0321] Szebeny and Rotwein (1994) cloned and characterized the mouse Igf2r gene. They found that it is 93 kb long, with 48 exons, and encodes a predicted protein of 2,482 amino acids.

[0322] Laureys et al. (1988) mapped the human IGF2R gene to 6q25-q27, using cloned cDNAs to probe Southern blots of somatic cell hybrid DNA and for in situ chromosomal hybridization. The corresponding mouse gene mapped to chromosome 17. The cation-dependent mannose 6-phosphate receptor (MPRD; 154540) is coded by chromosome 12. By fluorescence in situ hybridization, Rao et al. (1994) narrowed the assignment of the IGF2R gene to 6q26.

[0323] Acquati et al. (1994) described a 2-Mb YAC from the telomeric region of 6q containing the plasminogen-apolipoprotein(a) gene family at its centromeric end and IGF2R at the telomeric end. About 350 kb separated IGF2R from the nearest member of the PLG/LPA cluster of genes.

[0324] Mutation in either MPRD or MPRI might result in a clinical disorder resembling a mucolipidosis (252500, 252600). Waheed et al. (1988) showed that the M6P and IGF2 binding sites are located on different segments of the receptor. Kiess et al. (1988) presented biochemical evidence that the IGF2 receptor and the cation-independent mannose 6-phosphate receptor are the same protein but that the binding sites for the 2 ligands are distinct. In its guise as a mannose 6-phosphate receptor, the IGF2 receptor binds mannose 6-phosphate residues on lysosomal enzymes and transports them into lysosomes (Kornfeld and Mellman, 1989).

[0325] Mouse embryos produce transcripts of the type II receptor from the maternal chromosome but not from the paternal. This could explain why mice that are heterozygous for deletions of the locus develop normally if their paternal allele is missing but die during early development if the maternal allele is missing. Studies in transgenic mice (Barlow et al., 1991) show parental imprinting, i.e., monoallelic expression, of the Igf2r gene. The Igf2r gene maps to the T-associated maternal effect locus (Tme) on mouse chromosome 17. It is probably no coincidence that the IGF2 gene and the gene for its type 2 receptor are oppositely imprinted (DeChiara et al., 1991). Haig and Graham (1991) proposed that the oppositely imprinted genes function to control the ultimately adverse effects of excessive production of IGF2 from the maternal allele. The suggestion is based on the model of Haig and Westoby (1989) which proposes that the evolution of genomic imprinting is expected in organisms that have both a breeding system in which females carry offspring by more than one male during their life span and a system of parental care in which offspring receive most of their postfertilization nutrients from 1 parent (usually the mother) and thus compete with offspring fathered by other males. Strictly, imprinting is possible whenever an individual's interactions are asymmetric with respect to maternal- and paternal-side relatives.

[0326] Although in mice the M6P/IGF2R gene is maternally imprinted (Barlow et al. 1991), in humans imprinting appears to be a polymorphic trait (Xu et al. 1993; Kalscheuer et al. 1993; Ogawa et al. 1993). Thus, mice and any humans who are imprinted may have an increased susceptibility to hepatocellular carcinoma since only 1 mutation would be required to render the gene inactive. De Souza et al. (1995) noted that, since the M6P/IGF2R protein is normally present in the circulation, mutant receptors in the plasma might be helpful in liver tumor detection. Furthermore, they stated that mutated receptors on the plasma membrane of liver tumor cells might provide a surface antigen for the targeting of both therapeutic and diagnostic agents to liver tumors.

[0327] The serine proteinase granzyme B (GZMB; 123910) is crucial for the rapid induction of target cell apoptosis by cytotoxic T cells. GZMB enters cells in a perforin-independent manner, predicting the existence of a cell surface receptor(s). Motyka et al. (2000) presented evidence that this receptor is IGF2R. Inhibition of the GZMB-IGF2R interaction prevented GZMB cell surface binding, uptake, and the induction of apoptosis. Significantly, expression of IGF2R was essential for cytotoxic T cell-mediated apoptosis of target cells in vitro and for the rejection of allogeneic cells in vivo.

[0328] The cytosolic tails of both the cation-independent and the cation-dependent (154540) mannose 6-phosphate receptors contain acidic cluster-dileucine signals that direct sorting from the trans-Golgi network to the endosomal-lysosomal system. Puertollano et al. (2001) found that these signals bind to the VHS domain of the Golgi-localized, gamma-ear-containing, ARF-binding proteins (GGA1, 606004; GGA2, 606005; GGA3, 606006). The receptors and the GGAs left the trans-Golgi network on the same tubulovesicular carriers. A dominant-negative GGA mutant blocked exit of the receptors from the trans-Golgi network. Puertollano et al. (2001) concluded that the GGAs appear to mediate sorting of the mannose 6-phosphate receptors to the trans-Golgi network.

[0329] Zhu et al. (2001) found that the VHS domain of GGA2 binds the acidic cluster-dileucine motif in the cytoplasmic tail of the cation-independent mannose 6-phosphate receptor. Receptors with mutations in this motif were defective in lysosomal enzyme sorting. The hinge domain of GGA2 bound clathrin, suggesting that GGA2 could be a link between cargo molecules and clathrin-coated vesicle assembly. Thus, Zhu et al. (2001) concluded that GGA2 binding to the cation-independent mannose 6-phosphate receptor is important for lysosomal enzyme targeting.

[0330] Livestock cloning and in vitro embryo culture have been adversely affected by the exceptional size of some resulting lambs and calves. Multiple abnormalities associated with ‘large offspring syndrome’ (LOS) limit application of these technologies. Similar fetal overgrowth in humans and mice can result from altered expression of several imprinted genes that are expressed only from 1 parental allele, including IGF2R. Cloning or nonphysiologic embryo culture environments may result in inappropriate epigenetic modification of imprinted genes during early embryogenesis, when many allele-specific imprints are established or maintained. Young et al. (2001) demonstrated reduced fetal methylation and expression of sheep IGF2R, suggesting that preimplantation embryo procedures may be vulnerable to epigenetic alterations in imprinted genes. This highlighted the potential benefits of epigenetic diagnostic screening in developing embryo procedures.

[0331] A bidirectional silencer for a 400-kb region that contains 3 imprinted, maternally expressed protein-coding genes (IGF2R; SLC22A2, 602608; SLC22A3, 604842) has been shown by targeted deletion to be located in a sequence of 3.7 kb, which also contains the promoter for the imprinted, paternally expressed noncoding Air RNA (604893). Expression of Air is correlated with repression of all 3 genes on the paternal allele; however, Air RNA overlaps just 1 of these genes in an antisense orientation. By inserting a polyadenylation signal that truncates 96% of the RNA transcript, Sleutels et al. (2002) demonstrated that Air RNA is required for silencing. The truncated Air allele maintains imprinted expression and methylation of the Air promoter, but shows complete loss of silencing of the IGF2R/SLC22A2/SLC22A3 gene cluster on the paternal chromosome. Sleutels et al. (2002) concluded that noncoding RNAs have an active role in genomic imprinting.

[0332] The mannose 6-phosphate/insulin-like growth factor II receptor functions in the intracellular trafficking of lysosomal enzymes, the activation of the potent growth inhibitor, transforming growth factor beta, and the degradation of IGF2, a mitogen often overproduced in tumors. De Souza et al. (1995) demonstrated that 70% of human hepatocellular tumors have loss of heterozygosity (LOH) at the M6P/IGF2R locus at 6q26. In a separate report, De Souza et al. (1995) described a mutation screen that identified point mutations in the remaining allele of 25% of human hepatocellular carcinomas with LOH. One mutation created an alternative splice site within an intron (corresponding to intron 40 in mouse) and resulted in a truncated receptor; 2 others (147280.0001, 147280.0002) gave rise to significant amino acid substitutions. These mutations provided evidence to the authors that the M6P/IGF2R gene functions as a tumor suppressor in human liver carcinogenesis.

[0333] Souza et al. (1996) reported that the IGF2R gene contains a number of microsatellite repeats within its coding sequence. They demonstrated microsatellite instability in this gene in 12 of 92 gastrointestinal tumors studied which were replication/repair error-positive. Mutations occurred in 6 of the poorly differentiated tumors. They noted an anticorrespondence of IGF2R and TGFBR2 (190182) mutations. Of 31 gastrointestinal lesions studied with IGF2R or TGFBR2 mutations, 90% (28) contained mutations in one or the other, but not both, of these genes. Souza et al. (1996) demonstrated that all but 1 of the mutations occurred within an 8-polydeoxyguanine tract spanning nucleotides 4089-4096 of the IGF2R coding sequence. In 1 case of gastric adenocarcinoma, mutation occurred in a polyCT tract spanning nucleotides 6169-6180. These mutations all comprised 1- or 2-bp deletions or insertions within the microsatellite region, causing frameshifts and premature stop codons downstream. Souza et al. (1996) noted that the TGFBR2 gene is also subject to microsatellite instability within its coding region. They noted further that IGF2R and TGFBR2 genes comprise serial points in the same tumorigenesis pathway, since mutation of either gene alone occurred in 90% of the gastrointestinal tumors that they analyzed.

[0334] To facilitate genetic analyses of the imprint status of human M6P/IGF2R and loss of heterozygosity at this locus in cancer, Killian et al. (2001) screened American and Japanese populations for M6P/IGF2R single nucleotide polymorphisms (SNPs). They identified 9 novel intragenic SNPs and 3 amino acid variants in the ligand-binding domains of M6P/IGF2R that may be under selection in humans.

[0335] To determine whether paternal expression of the Igf2r gene is necessary for early development in the mouse, Lau et al. (1994) derived mice in which the gene had been disrupted by targeted mutagenesis in embryonic stem (ES) cells with the subsequent introduction of the mutation into the germline of mice. Lau et al. (1994) found that murine embryos that inherit a nonfunctional Igf2r gene from their father are viable and develop normally into adults; however, most mice inheriting the same mutated allele from their mothers die around the time of birth as a consequence of major cardiac abnormalities. The mice that inherit the mutant allele from their mothers do not express Igf2r in their tissues, are 25 to 30% larger than their normal sibs, have elevated levels of circulating IGF2 and IGF-binding proteins, and exhibit a slight kink in the tail. The findings of overgrowth may support the suggestion that relaxation of maternal imprinting of IGF2 plays a role in the features of Beckwith-Wiedemann syndrome (130650) (Feinberg 1993).

### Allelic Variants

### (Selected Examples)

### 0.0001 Hepatocellular Carcinoma, Somatic [IGF2R, GLY1449VAL]

[0336] De Souza et al. (1995) found a C-to-A transversion in 1 allele of the IGF2R gene creating a gly1449-to-val amino acid substitution in the gene product. This mutation was found in a tumor which showed deletion of the other allele as judged by loss of heterozygosity (LOH).

### 0.0002 Hepatocellular Carcinoma, Somatic [IGF2R, GLY1464GLU]

[0337] De Souza et al. (1995) found a G-to-A transition in 1 allele of the IGF2R gene creating a gly1464-to-glu amino acid substitution in the gene product. This mutation was found in a tumor which showed deletion of the other allele as judged by loss of heterozygosity (LOH).

[0338] Another sequence (Lab Designation L24_{—}4_{—}2BE_rE (SEQ ID NO: 200)) comprises sequence encoding DISTAL-LESS HOMEO BOX 2 (DLX2). This protein is also known as TES 1 and the sequence maps to gene map locus 2q32

[0339] To isolate genes involved in forebrain development, Porteus et al. (1992) used subtractive hybridization of cDNA libraries to enrich for cDNAs that are encoded by genes preferentially expressed in mouse gestational day 15 telencephalon. In an attempt to find genes that are candidates for the regulation of forebrain development, the subtracted cDNA library was screened with probes homologous to the homeo box, a conserved motif found in transcriptional regulators that often control development. A novel cDNA, named Tes1, that encodes a homeodomain was identified. Its sequence showed that Tes1 was a member of the ‘Distal-less’ family of homeodomain-encoding genes. Related by amino acid homology within their homeodomains, the known members of the family are Tes1, Dlx1 (a mouse gene), and Dll (a Drosophila melanogaster gene). Ozcelik et al. (1992) determined the chromosomal location of the Tes1 gene in mouse and human. Because Tes1 is a member of the Dlx gene family, the gene symbol for this locus was established as DLX2 (human) and Dlx2 (mouse). By Southern analysis of somatic cell hybrid lines, they assigned the human locus to chromosome 2cen-q33 and the mouse locus to chromosome 2. An EcoRI dimorphism was used for recombinant inbred strain mapping in the mouse. The results placed the Dlx2 gene near the Hox4 cluster on mouse chromosome 2.

[0340] Qiu et al. (1995) utilized information about the genomic structure of the murine Dlx2 gene to carry out gene targeting experiments and made deletions in the Dlx2 gene in mouse embryonic stem cells for use in transgenic mice. They reported that heterozygous mice appeared normal and homozygous mice died on the day of birth. The mutant mice had altered differentiation of interneurons in the olfactory bulb and abnormal morphogenesis of the cranial neural crest-derived skeletal structures formed from the proximal first and second branchial arches, causing cleft palate.

[0341] McGuinness et al. (1996) reported the DNA sequence of the human DLX2 gene and compared this to the murine gene. Analysis of the sequence indicated that the human DLX2 gene has 3 exons and 2 introns. The deduced sequence of the human DLX2 protein shows that the human and mouse DLX2 proteins are 92% identical. The human DLX2 protein is 330 amino acids in length, while the mouse DLX2 protein contains 332 amino acids. The introns have 63 to 71% identity. Domains identified in the human and mouse DLX2 gene include a homeodomain and short stretches of homology to several transcription factors. McGuinness et al. (1996) noted that availability of the sequence of the human DLX2 gene will facilitate the use of PCR analysis for screening for human mutations in DLX2 in abnormal development.

[0342] Another sequence (Lab Designation seq1b_lac (SEQ ID NO: 267) comprises sequence encoding ZINC FINGER PROTEIN 7 (ZNF7). This protein is also known as KOX4. This sequence maps to gene map locus 8q24

[0343] On the basis of sequence similarity in the repeated zinc finger domain, Lania et al. (1990) identified and characterized 2 human cDNA clones, designated ZNF7 and ZNF8, both of which encoded proteins containing potential finger-like nucleic acid binding motifs. The predicted 686-amino acid ZNF7 protein contains 15 zinc finger domains that comprise nearly 70% of the protein. Northern blot analysis revealed that ZNF7 is expressed as 2.8- and 3,3-kb mRNAs in a variety of human cell lines.

[0344] By in situ hybridization, Lania et al. (1990) localized ZNF7 to 8q24 and ZNF8 to 20q13. Bray et al. (1991) likewise mapped ZNF7 to 8qter by chromosomal in situ suppression hybridization with fluorescent probe detection. Bray et al. (1991) determined that the genomic locus designated ZNF7 corresponds to KOX4 in the set of 30 zinc finger protein-encoding cDNAs (KOX1-KOX30) previously isolated from a T-cell library (Thiesen, 1990). They concluded that the human genome contains many, probably several hundred, zinc finger genes with consensus his/cys (H/C) link regions. Huebner et al. (1993) confirmed the assignment of ZNF7 to 8q24 by analysis of rodent/human somatic cell hybrids and by in situ hybridization. They showed that ZNF7 is telomeric to the MYC locus (190080).

[0345] Another sequence (Lab Designation L197B3E-rE (SEQ ID NO: 135))comprises sequence encoding BCL2-LIKE 1 (BCL2L1).

[0346] Boise et al. (1993) isolated a BCL2-related gene, which they designated BCLX, and showed that it can function as a BCL2-independent regulator of programmed cell death (apoptosis). Alternative splicing resulted in 2 distinct BCLX mRNAs. The protein product of the larger mRNA (BCLXL) was similar in size and predicted structure to BCL2. When stably transfected into an IL3-dependent cell line, it inhibited cell death upon growth factor withdrawal at least as well as BCL2. Unexpectedly, the smaller mRNA species (BCLXS) encodes a protein that inhibits the ability of BCL2 to enhance the survival of growth factor-deprived cells. In vivo, the smaller BCLX mRNA was expressed at high levels in cells that undergo a high rate of turnover, such as developing lymphocytes. In contrast, the large form of BCLX was found in tissues containing long-lived postmitotic cells, such as adult brain. Together these data suggested that BCLX plays an important role in both positive and negative regulation of programmed cell death. Boise et al. (1993) found that BCLX is highly conserved in vertebrate evolution. Vander Heiden et al. (1997) observed in Jurkat cells that a wide variety of apoptotic and necrotic stimuli induce progressive mitochondrial swelling and outer mitochondrial membrane rupture. Discontinuity of the outer mitochondrial membrane results in cytochrome c redistribution from the intermembrane space to the cytosol, followed by subsequent inner mitochondrial membrane depolarization. The mitochondrial membrane protein BCLX could inhibit these changes in cells treated with apoptotic stimuli. In addition, BCLX-expressing cells adapt to growth factor withdrawal or staurosporine treatment by maintaining a decreased mitochondrial membrane potential. BCLX expression also prevents mitochondrial swelling in response to agents that inhibit oxidative phosphorylation. These data suggested to Vander Heiden et al. (1997) that BCLX promotes cell survival by regulating the electrical and osmotic homeostasis of mitochondria.

[0347] Silva et al. (1998) found that erythroid cells from patients with polycythemia vera (263300) survived in vitro without erythropoietin. This finding correlated with the expression of BCLX protein, even in mature erythroblasts that normally do not express BCLX. The large BCLX mRNA was the predominant form detected in the erythropoietin-independent erythroid cells. They concluded that deregulated expression of BCLX may contribute to the erythropoietin-independent survival of erythroid-lineage cells in polycythemia vera and thereby contribute to the pathogenesis of this disorder. Moliterno et al. (1998) simultaneously reported impaired expression of the thrombopoietin receptor (MPL; 159530) by platelets from patients with polycythemia vera.

[0348] During transduction of an apoptotic signal into the cell, there is an alteration in the permeability of the membranes of the cell's mitochondria, which causes the translocation of the apoptogenic protein cytochrome c into the cytoplasm, which in turn activates death-driving proteolytic proteins known as caspases (see 147678). The BCL2 family of proteins, whose members may be antiapoptotic or proapoptotic, regulates cell death by controlling this mitochondrial membrane permeability during apoptosis. Shimizu et al. (1999) created liposomes that carried the mitochondrial porin channel VDAC (604492) to show that the recombinant proapoptotic proteins Bax (600040) and Bak (600516) accelerate the opening of VDAC, whereas the antiapoptotic protein BCLXL closes VDAC by binding to it directly. Bax and Bak allow cytochrome c to pass through VDAC out of liposomes, but passage is prevented by BCIXL. In agreement with this, VDAC1-deficient mitochondria from a mutant yeast did not exhibit a Bax/Bak-induced loss in membrane potential and cytochrome c release, both of which were inhibited by BCLXL. Shimizu et al. (1999) concluded that the BCL2 family of proteins bind to the VDAC in order to regulate the mitochondrial membrane potential and the release of cytochrome c during apoptosis.

[0349] FUS-associated proteins and TLS appear to be the same;

[0350] Uranishi et al. (“Involvement of the pro-oncoprotein TLS (translocated in liposarcoma) in nuclear factor-kappa B p65-mediated transcription as a coactivator” J Biol Chem 20; 276(16):13395-401, April 2001) demonstrate that translocated in liposarcoma (TLS), also termed FUS, is an interacting molecule of the p65 (RelA) subunit of the transcription factor nuclear factor kappaB (NF-kappaB) using a yeast two-hybrid screen. We confirmed the interaction between TLS and p65 by the pull-down assay in vitro and by a coimmunoprecipitation experiment followed by Western blot of the cultured cell in vivo. TLS was originally identified as part of a fusion protein with CHOP arising from chromosomal translocation in human myxoid liposarcomas. TLS has been shown to be involved in TFIID complex formation and associated with RNA polymerase II. However, the role of TLS in transcriptional regulation has not yet been clearly elucidated. We found that TLS enhanced the NF-kappaB-mediated transactivation induced by physiological stimuli such as tumor necrosis factor alpha, interleukin-1beta, and overexpression of NF-kappaB-inducing kinase. TLS augmented NF-kappaB-dependent promoter activity of the intercellular adhesion molecule-1 gene and interferon-beta gene. These results suggest that TLS acts as a coactivator of NF-kappaB and plays a pivotal role in the NF-kappaB-mediated transactivation.

[0351] A group of evolutionarily conserved pleiotropic COP/DET/FUS proteins was initially defined by their ability to repress photomorphogenesis in Arabidopsis (Suzuki et al. “Arabidopsis COP10 is a ubiquitin-conjugating enzyme variant that acts together with COP1 and the COP9 signalosome in repressing photomorphogenesis” Genes Dev 16(5):554-9, Mar. 1, 2002). It was proposed that this regulation be mediated by targeting degradation of key cellular regulators that promote photomorphogenesis. Among them, COP1 and the COP9 signalosome have been hypothesized to fulfill the roles as an ubiquitin ligase (E3) and an essential E3 modulator. Here we report that COP10 encodes a protein similar to ubiquitin-conjugating enzyme (E2) variant proteins (U1EV). COP10 is part of a nuclear protein complex and capable of directly interacting with both COP1 and the COP9 signalosome. Our data indicates that COP10 defines a possible E2 activity, thus validating the working hypothesis that the pleiotropic COP/DET/FUS group of proteins defined a protein ubiquidnation pathway.

[0352] Another sequence (Lab Designation 8C5_{—}6_rE (SEQ ID NO: 46)) comprises sequence encoding AMIOPEPTIDASE, PUROMYCIN-SENSITIVE (NPEPPS). This protein is also known as PSA and METALLOPROTEASE MP100(MP 100). This sequence maps to gene map locus 17q21

[0353] Aminopeptidases are a group of exopeptidases that hydrolyze amino acids from the N terminus of a peptide substrate. Puromycin-sensitive aminopeptidase (EC 3.4.11.14) contains the zinc-binding domain characteristic of the gluzincin group of zinc metalloproteases (see 605896).

[0354] Tobler et al. (1997) cloned PSA from a human fetal brain cDNA library using the mouse PSA cDNA as probe. They established that translation is initiated at the second of 2 possible start codons, resulting in a deduced 875-amino acid protein with a molecular mass of 99 kD by SDS-PAGE. PSA contains a zinc-binding motif conserved among gluzincin aminopeptidases and shares 98% sequence identity with the mouse protein. Northern blot analysis detected ubiquitous expression of a 4.8-kb transcript, with highest expression in brain. By in situ hybridization of adult human brain sections, expression was localized to the perikaryon of neurons of the cortex and cerebellum. Using immunofluorescence localization of transfected HeLa cells, Tobler et al. (1997) found that PSA localizes to the perinuclear cytoplasm and shows a filamentous staining pattern. Bauer et al. (2001) cloned PSA cDNA from a human skeletal muscle library. Northern blot analysis detected major and minor transcripts of 4.8 and 4.2 kb, respectively. Huber et al. (1999) determined that PSA is identical to the matalloprotease MP100 that was originally isolated as a beta-secretase candidate from human brain by Schonlein et al. (1994).

[0355] Huber et al. (1999) were able to colocalize and coimmunoprecipitate PSA with beta-amyloid precursor protein (104760); however, PSA did not increase production of the amyloid-beta peptide in cotransfected cells. By RT-PCR, but not by Northern blot analysis, Bauer et al. (2001) found that PSA was upregulated in human leukemic cells following vitamin D stimulation.

[0356] Thompson et al. (1999) determined that the PSA gene contains 23 exons spanning approximately 40 kb. They found that the active site motif is split between exons 9 and 10. Analysis of the 5-prime flanking region indicated that the gene lacks a TATA box, is GC rich, and contains 5 putative SP1 (189906)-binding sites.

[0357] By FISH, Bauer et al. (2001) mapped the PSA gene to chromosome 17q21. Osada et al. (1999) mapped the mouse Psa gene to a region of syntenic homology on chromosome 11.

[0358] Another sequence (Lab Designation 70A_rE (SEQ ID NO: 188)) comprises sequence encoding ANNEXIN A3 (ANXA3). This protein is also known as ANNEXIN III (ANX3) and as LIPOCORTIN m. This sequence maps to gene map locus 4q21.

[0359] The annexins are a family of calcium-dependent phospholipid-binding proteins. The family consists of at least 10 distinct members, each of which contains 4 or 8 copies of an 80-amino acid repeating unit first identified in lipocortin/annexin I. Annexin III was previously identified as inositol 1,2-cyclic phosphate 2-phosphohydrolase (EC 3.1.4.36), an enzyme of inositol phosphate metabolism, and also as placental anticoagulant protein III, lipocortin III, calcimedin 35-alpha, and an abundant neutrophil cytoplasmic protein. The mature annexin III protein contains 322 amino acids and, like other annexins, consists primarily of 4 copies of a 70- to 80-amino acid repeat unit. Characterizing the gene from directly amplified genomic DNA and from 6 genomic clones in phage lambda, Tait et al., (1993) determined that the transcribed region spans 58 kb and contains 12 introns ranging from 0.3 to 19.1 kb and 13 exons ranging from 53 to 374 bases. Northern blot showed a single mRNA species with approximately 1.7 kb in all tissues examined.

[0360] Tait et al. (1991) localized the ANXA3 gene to 4q21 (q13-q22) by PCR analysis of a human-rodent hybrid cell panel, confirmed by genomic Southern blot analysis of the same panel with a cDNA probe, and by in situ hybridization with a cDNA probe.

[0361] Another sequence (Lab Designation 6BSA#12-rE (SEQ ID NO: 39) comprises sequence encoding ADAM 10. This sequence maps to human chromosomal location 15q21.3-q2.

[0362] Lunn et al. (“Purification of ADAM 10 from bovine spleen as a TNFalpha convertase” FEBS Lett 400(3):333-5, Jan. 6, 1997) purified a protease with characteristics of TNFalpha convertase from bovine spleen membranes. Peptide sequencing of the purified protein identified it as ADAM 10 (Genbank accession no. Z21961). This metalloprotease cleaves a recombinant proTNFalpha substrate to mature TNFalpha, and can cleave a synthetic peptide substrate to yield the mature TNFalpha amino terminus in vitro. The enzyme is sensitive to a hydroxamate inhibitor of MMPs, but insensitive to phosphoramidon. In addition, cloned ADAM 10 mediates proTNFalpha processing in a processing-incompetent cell line.

[0363] Lab Designation 6b65 is a rearranged vector—the tag site may be in ptpl1, sequence is in abcr (abca4—which is not expressed in the parent cell or mutant) and maps to chromosomal location 1p22.1-p21. We have disrupted other rho related genes. PTPL1-associated RhoGAP 1, a GTPase activating protein; activates members of the Rho subfamily of ras-related GTP binding proteins; has a cysteine rich domain

[0364] Another sequence (Lab Designation 4AE5_rE (SEQ ID NO: 64)) comprises sequence encoding MEMBRANE-SPANNING 4-DOMAINS, SUBFAMILY A, MEMBER 8B (MS4A8B). This sequence maps to gene map locus 11q12-q13.

[0365] MS4A family proteins share structural similarity, amino acid sequence homology, and chromosomal location. They contain 4 highly conserved transmembrane domains, flanked by N- and C-terminal cytoplasmic regions.

[0366] By database searching for homologs of CD20 (MS4A1; 112210), Liang and Tedderi (2001) obtained a cDNA encoding MS4A8B. The predicted 250-amino acid protein is 63% identical to its mouse homolog. PCR analysis detected weak expression of MS4A8B in cDNA from 3 B-cell lines.

[0367] By genomic sequence analysis, Liang and Tedder (2001) mapped the MS4A8B gene to chromosome 11q12-q13, in the same region as MS4A2 (147138) and MS4A3 (606498).

[0368] Rho GTPases play a fundamental role in numerous cellular processes that are initiated by extracellular stimuli that work through G protein coupled receptors. The encoded protein may form complex with G proteins and stimulate Rho-dependent signals. This protein is similar to the NET1A protein.

[0369] Rho guanine nucleotide exchange factor 3 (RhoGEF); may function in signaling cascades

[0370] Another sequence (Lab Designation 42_{—}8#3_rE (SEQ ID NO: 324)) comprises sequence encoding ARHGEF3. This sequence maps to gene map locus 3p21-p13.

[0371] RhoGEFs play an important role in various signaling cascades and are implicated in human conditions like cancer and mental retardation (Thiesen et al. “Isolation of two novel human RhoGEFs, ARHGEF3 and ARHGEF4, in 3p 13-21 and 2q22” Biochem Biophys Res Commun; 273(1):364-9, Jun. 24, 2000). A database search combined with screening of a human neuronal teratocarcinoma library identified two novel RhoGEFs, ARHGEF3 and ARHGEF4 (HGMW-approved symbols). The widely expressed ARHGEF3 transcript of 3561 nucleotides encodes a polypeptide of 526 amino acids with homology to NET1. The ARHGEF4 gene generates two transcripts of 3665 and 4000 nucleotides that translate into 720 amino acid residues. Expression of ARHGEF4 is restricted to brain and the encoded protein shows homology to collybistin. FISH analysis of genomic clones mapped ARHGEF3 to 3p13-21 and ARHGEF4 to 2q22. Copyright 2000 Academic Press.

[0372] Another sequence (Lab Designation 34X25_{—}23_rE (SEQ ID NO: 153)) comprises sequence encoding PHOSPHODIESTERASE 4B, cAMP-SPECIFIC (PDE4B); murine chr 4 2377737 . . . 2727820. This protein is also known as DUNCE-LIKE PHOSPHODIESTERASE E4, FORMERLY; DPDE4. This sequence maps to gene map locus 1p31.

[0373] Using RNA from a human lymphocytic B-cell line and a rat PDE IV member B probe, Obernolte et al. (1993) isolated a 3.8-kb cDNA. A single large open reading frame predicted a 564-amino acid protein with 92.9% identity to rat Pde4b; at the nucleotide level, the identity was 86.3%. They determined that a related cDNA clone isolated from human monocytes by Livi et al. (1990) was the human homolog of rat Pde4a (600126). Southern blot analysis indicated that distinct genes encode these 2 PDE IV family members.

[0374] Huston et al. (1997) cloned a novel human (plus its cognate rat) PDE4B splice variant and compared its activities to the 2 other splice variants from this locus. Alternative splicing of mRNA generated from both the human and rat PDE4B genes produced long and short splice variants that had unique N-terminal regions. It was suggested that these alternatively spliced regions determined changes in the maximal catalytic activity of the isoforms, their susceptibility to inhibition by rolipram, and mode of interaction with particulate fractions.

[0375] Milatovich et al. (1994) mapped the PDE4B gene to human 1p31 by a combination of Southern analysis of somatic cell hybrid lines and fluorescence in situ hybridization (FISH); they assigned the mouse homolog to chromosome 4 by Southern analysis of recombinant inbred (RI) mouse strains. Through the use of somatic cell hybrids segregating either human or rat chromosomes, Szpirer et al. (1995) mapped the PDE4B gene to human chromosome 1 and rat chromosome 5.

[0376] Xu et al. (2000) determined the 3-dimensional structure of the catalytic domain of phosphodiesterase 4B2B to 1.77-angstrom resolution. The active site was identified and contains a cluster of 2 metal atoms. Xu et al. (2000) concluded that the structure suggests the mechanism of action and basis for specificity, and will provide a framework for structure-assisted drug design for members of the phosphodiesterase family.

[0377] Gale et al. describe the pharmacokinetic and pharmacodynamic profile following oral administration of the phosphodiesterase (PDE)4 inhibitor V11294A in healthy volunteers (Br J Clin Pharmacol 2002 November; 54(5):478-84). Their aim was to assess the pharmacokinetic and pharmacodynamic profile of the novel PDE4 inhibitor V11294A (3-(3-cyclopentyloxy-4-methoxybenzyl)-6-ethylamino-8-isopropyl-3H purine hydrochloride) in healthy male volunteers. METHODS: This was a double-blind, single dose, randomized crossover study in eight healthy volunteers who received a single oral, fasting dose of V11294A (300 mg) or placebo. Blood samples were taken before and 0.5, 1, 2, 2.5, 3, 4, 6, 9, 12, 18 and 24 h after oral dosing for determination of plasma concentrations of V11294A. Blood samples were also taken before and 3 and 24 h after dosing for the assessment of the effect of V11294A on mononuclear cell proliferation and tumour necrosis factor (TNF) release in whole blood. RESULTS: Following a single oral dose of 300 mg V11294A, plasma concentrations of V11294A and its active metabolite V10332 reached Cmax (ng ml−1; mean +/− s.d.; 1398+/−298, 1000+/−400, respectively) after 2.63+/−0.79 and 5.9+/−2.3 h, respectively. For V11294A and V10332, t½ were 9.7+/−3.9 and 9.5+/−1.7 h, and AUC(0, infinity) were 18100+/−6100 and 18600+/−8500 ng ml−1 h, respectively. At 3 h dosing, plasma concentrations of V11294A and V10332 (3-(3-cyclopentyloxy-4-methoxy-benzyl)-8-isopropyl-3H-purin-6-ylamine) were 1300+/−330 and 860+/−300 ng ml-1, 7 and 3 times their in vitro IC50s for inhibition of TNF release and proliferation, respectively. Treatment with V11294A resulted in a significant reduction of lipopolysaccharide (LPS)-induced TNF release at 3 h (P<<0.001) and at 24 h (P<<0.05) post ingestion. The amount of TNF released (pmol ml−1) in response to a submaximal concentration of LPS (4 ng ml−1) was not significantly altered following placebo treatment (before 681+/−68 vs 3 h postdose 773+/−109, P=0.27). In contrast, there was a significant reduction in the amount of TNF released following treatment with V11294A (before 778+/−87 vs 3 h postdose 566+/−72, P=0.02). Phytohaemagluttinin (PHA) stimulated the incorporation of [3H]-thymidine in whole blood prior to drug administration. V11294A inhibited the PHA-induced proliferation at 3 h (P<<0.05). No adverse reactions were noted following single oral administration of V11294A. CONCLUSIONS: A single oral 300 mg dose of V11294A administered to healthy volunteers results in plasma concentrations adequate to inhibit activation of inflammatory cells ex vivo, which persists for at least 24 h without any adverse reactions.

[0378] Another sequence comprises sequence encoding GLUCOCORTICOID RECEPTOR (GCCR). This sequence maps to gene map locus 5q31

[0379] Vingerhoeds et al. (1976) reported a case of cortisol resistance. High levels of cortisol (without stigmata of Cushing syndrome), resistance of the hypothalamic-pituitary-adrenal axis to dexamethasone, and an affinity defect of the glucocorticoid receptor characterized the disorder. Chrousos et al. (1982) restudied the family reported by Vingerhoeds et al. (1976). A man who was presumably homozygous had mineralocorticoid excess resulting in hypertension, hypokalemia, and metabolic alkalosis. One of his brothers, who had severe hypertension and died of a cerebrovascular accident at age 54, may also have been homozygous. Another brother and his son were apparently heterozygous; they showed slightly elevated 24-hour mean plasma cortisol levels and increased urinary free cortisol. Lipsett et al. (1986) provided further follow-up on the 4-generation family originally reported by Vingerhoeds et al. (1976). Autosomal dominant inheritance of glucocorticoid resistance was clearly demonstrated. Lipsett et al. (1986) believed that a mutation in the glucocorticoid receptor was responsible, although other explanations could be invoked. The single homozygote in the family was the proband; the other persons with elevated plasma cortisol levels and increased urinary free cortisol represented heterozygotes. The parents of the proband descended from families with consanguinity that occurred before the 16th century. The 2 parental families had lived in close proximity for many generations. This cortisol resistance is probably the rarest cause of treatable hypertension yet described. Affected mother and son with decreased glucocorticoid receptors were reported by Iida et al. (1985).

[0380] Bronnegard et al. (1986) described a woman with receptor-mediated resistance to cortisol as indicated by elevated 24-hour mean plasma cortisol levels and increased free urinary cortisol. Plasma ACTH concentrations were normal but she was resistant to adrenal suppression by dexamethasone. No stigmata of Cushing syndrome were present. The patient had symptoms of pronounced fatigue. Menopause had occurred at age 43. The patient's only child, a son, aged 29 years, had periods of inexplicable fatigue that had made him stay home from school and work. Because of the extreme fatigue that led to the mother's working only half-time, Addison's disease was suspected, but rather than hypocortisolism, elevation of urinary cortisol values was found. Bronnegard et al. (1986) found that the end-organ insensitivity to cortisol was not due to decreased concentration or ligand affinity of the receptor. Rather the woman and her son showed an increased thermolability of the cortisol receptor, a phenomenon also observed with the androgen receptor in patients with the testicular feminization syndrome (300068).

[0381] Lamberts et al. (1986) described cortisol resistance in a 26-year-old woman with hirsutism, mild virilization, and menstrual difficulties. They thought that the abnormality was autosomal dominant because her father and 2 brothers had increased plasma cortisol concentrations that did not suppress normally in response to dexamethasone. No hypertension or hypokalemic alkalosis was present. The proband had male-pattern scalp baldness. Nawata et al. (1987) studied a 27-year-old woman with the syndrome of glucocorticoid resistance. She was initially thought to have Cushing disease, based on high plasma ACTH and serum cortisol levels, increased urinary cortisol secretion, resistance to adrenal suppression with dexamethasone, and bilateral adrenal hyperplasia by computed tomography and scintigraphy; however, she had no clinical signs or symptoms of Cushing syndrome. Laboratory studies indicated that the patient's glucocorticoid resistance was due to a decrease in the affinity of the receptor for glucocorticoids and a decrease in the binding of the GCCR complex to DNA.

### Corticotrophinomas

[0382] As cortisol resistance can be caused by genetic abnormalities in the GRL gene, Huizenga et al. (1998) investigated whether the insensitivity of corticotropinomas to cortisol is also caused by de novo GRL mutations. Except for 1 silent point mutation, they did not identify mutations in the GRL gene in leukocytes or corticotropinomas from 22 patients with Cushing disease. Of the 22 patients, 18 were heterozygous for at least 1 polymorphism, and 6 of the 18 had loss of heterozygosity (LOH) in the tumor DNA. They concluded that LOH at the GRL locus is a relatively frequent phenomenon in pituitary adenomas of patients with Cushing disease and that this may explain the relative resistance of the adenoma cells to the inhibitory feedback action of cortisol on ACTH secretion.

[0383] Examples of resistance to cortisol are known; the guinea pig is a ‘corticoresistant’ species (Vingerhoeds et al. 1976).

[0384] Two New World primates, the squirrel monkey and the marmoset, have markedly elevated plasma cortisol levels without physiologic evidence of glucocorticoid hormone excess. Chrousos et al. (1982) showed that their hypothalamic-pituitary-adrenal axis is resistant to suppression by dexamethasone. They studied glucocorticoid receptors in circulating monocytes and cultured skin fibroblasts of New and Old World monkeys and found that, although the receptor content was the same in all species, the 2 New World species had markedly decreased binding affinity for dexamethasone. The presumed mutation must have occurred after bifurcation of the Old and New World primates (about 60 Myr ago) and before diversion of the 2 New World species (about 15 Myr ago). A difference between the disorder in man with an affinity defect of the glucocorticoid receptor and the state in New World monkeys is that in the severe form of the human disease, sodium-retaining corticoids (corticosterone and deoxycorticosterone) are elevated many-fold, producing hypertension and hypokalemic alkalosis. The mineralocorticoid overproduction, which does not occur in the New World monkeys, is probably due to corticotropin hyperstimulation of the adrenal cortex.

[0385] Glucocorticoid hormones, like other classes of steroid hormones, exert their cellular action by complexing with a specific cytoplasmic receptor which in turn translocates to the nucleus and binds to specific sites on chromatin. The glucocorticoid receptor was the first transcription factor to be isolated and studied in detail (Muller and Renkawitz, 1991). The glucocorticoid receptor (GCCR) is crucial to gene expression. It is a 94-kD polypeptide and according to one model is thought to have distinct steroid-binding and DNA-binding domains. Weinberger et al. (1985) used expression cloning techniques to select human glucocorticoid receptor cDNA.

[0386] Hollenberg et al. (1985) identified cDNAs encoding the human glucocorticoid receptor (symbolized hGR by them). These DNAs predicted 2 protein forms of 777 (alpha) and 742 (beta) amino acids, which differ in their carboxy termini. The proteins contain a cysteine/lysine/arginine-rich region which may define the DNA-binding domain.

[0387] Weinberger et al. (1985, 1987) pointed out that the glucocorticoid receptor that they cloned is related to the erb-A family of oncogenes (see 190120 and 190160). Cloned members of the erb oncogene family showed a strong relatedness to the DNA-binding domain of the glucocorticoid receptor. A short region of GRL was homologous to certain homeotic proteins of Drosophila. Carlstedt-Duke et al. (1987) analyzed the domain structure of the rat liver GCR protein. The steroid-binding domain, defined by a unique tryptic cleavage, corresponded to the COOH-terminal protein with the domain border in the region of residue 518. The DNA-binding domain, defined by a region with chymotryptic cleavage sites, was immediately adjacent to the steroid-binding domain with its border in the region of residues 410-414.

[0388] Of the 2 isoforms of the glucocorticoid receptor generated by alternative splicing, GR-alpha is a ligand-activated transcription factor that, in the hormone-bound state, modulates the expression of glucocorticoid-responsive genes by binding to a specific glucocorticoid response element (GRE) DNA sequence. In contrast, GR-beta does not bind glucocorticoids and is transcriptionally inactive. Bamberger et al. (1995) demonstrated that GR-beta is able to inhibit the effects of hormone-activated GR-alpha on a glucocorticoid-responsive reporter gene in a concentration-dependent manner. The inhibitory effect appeared to be due to competition for GRE target sites. Since RT-PCR analysis showed expression of GR-beta mRNA in multiple human tissues, GR-beta may be a physiologically and pathophysiologically relevant endogenous inhibitor of glucocorticoid action and may participate in defining the sensitivity of tissues to glucocorticoids.

[0389] Roux et al. (1996) found that mutation of isoleucine-747 to threonine in the C-terminal portion of the ligand-binding domain of NR3C1 alters the specificity of the ligand for transactivation. Whereas natural glucocorticoids such as cortisol or corticosterone were completely inactive, synthetic steroids like dexamethasone efficiently stimulated 1747T mutant NR3C1-mediated transactivation. The basis for the inability of cortisol to activate I747T was predicted from the canonical 3-dimensional structure of nuclear receptor ligand-binding domains because isoleucine-747 is in the direct vicinity of residues that contribute to the ligand-binding pocket.

[0390] Using oligonucleotide-directed mutagenesis, Lind et al. (1996) found functional substitutions of residue 736 with serine (cys736 to ser) and threonine (cys736 to thr). The cys736-to-ser protein showed reduced sensitivity to all hormones tested in transactivation assays and a reduced hormone binding affinity. A correspondence between sensitivity to hormone in transactivation assays and hormone-binding affinity was also observed for the cys736-to-thr protein. The authors concluded that very conservative substitutions of cys736, including serine and threonine, cause variable effects on hormone binding that distinguish between different glucocorticoid steroid hormones.

[0391] Diamond et al. (2000) showed, in diverse cell types, that glucocorticoids can up- or down-modulate aggregation and nuclear localization of expanded polyglutamine polypeptides derived from the androgen receptor (AR; 313700) or huntingtin (HD; 143100) through specific regulation of gene expression. Wildtype glucocorticoid receptor, as well as C-terminal deletion derivatives, suppressed the aggregation and nuclear localization of these polypeptides, whereas mutations within the DNA-binding domain and the N terminus of GCR abolished this activity. Surprisingly, deletion of a transcriptional regulatory domain within the GCR N terminus markedly increased aggregation and nuclear localization of the expanded polyglutamine proteins. Thus, aggregation and nuclear localization of expanded polyglutamine proteins are regulated cellular processes that can be modulated by a well-characterized transcriptional regulator, the GCR. The findings suggested approaches to study the molecular pathogenesis and selective neuronal degeneration of polyglutamine expansion diseases.

### Glucocorticoid Receptor-Beta

[0392] Oakley et al. (1996) examined the expression, biochemical properties, and physiologic function of GR-beta. They found that the GR-beta message has a widespread tissue distribution. Although the GRL gene had previously been reported to consist of 10 exons (Encio and Detera-Wadleigh, 1991), Oakley et al. (1996) suggested that the GRL sequences formerly identified as exon 9-alpha, intron J, and exon 9-beta comprise 1 large terminal exon (exon 9) of approximately 4.1 kb and that the GRL gene is organized into 9 rather than 10 exons. They demonstrated that GR-beta resides primarily in the nucleus of transfected cells independent of hormone treatment. Oakley et al. (1996) showed that dominant-negative activity occurs in cells that have endogenous GR-alpha receptors. In addition, they demonstrated that the repression of GR-alpha activity occurs with the simple promoter pGRE2CAT, indicating that the repression is a general phenomenon of glucocorticoid-responsive promoters and that GRE-mediated transcription is actually inhibited.

[0393] Corticosteroids have specific effects on cardiac structure and function mediated by mineralocorticoid and glucocorticoid receptors (MR and GR, respectively). Aldosterone and corticosterone are synthesized in rat heart. To see whether they might also be synthesized in the human cardiovascular system, Kayes-Wandover and White (2000) examined the expression of genes for steroidogenic enzymes as well as genes for GR, MR, and 11-hydroxysteroid dehydrogenase (HSD11B2; 218030), which maintains the specificity of MR. Human samples were from left and right atria, left and right ventricles, aorta, apex, intraventricular septum, and atrioventricular node, as well as whole adult and fetal heart. Using RT-PCR, mRNAs encoding CYP11A (118485), CYP21 (201910), CYP11B1 (202010), GR, MR, and HSD11B2 were detected in all samples except ventricles, which did not express CYP11BJ. CYP11B2 (124080) mRNA was detected in the aorta and fetal heart, but not in any region of the adult heart, and CYP17 (202110) was not detected in any cardiac sample. Levels of steroidogenic enzyme gene expression were typically 0.1% those in the adrenal gland. The authors concluded that these findings are consistent with autocrine or paracrine roles for corticosterone and deoxycorticosterone, but not cortisol or aldosterone, in the normal adult human heart.

[0394] Neutrophils are markedly less sensitive to glucocorticoids than are T lymphocytes. Using immunofluorescence, Western blot, and RNA dot blot analyses, Strickland et al. (2001) showed that GR-alpha and GR-beta are both expressed on mononuclear cells and neutrophils, with GR-beta expression somewhat greater than GR-alpha on neutrophils. IL8 (146930) stimulation of neutrophils resulted in a significant increase in GR-beta but not GR-alpha expression in neutrophils. Unlike human neutrophils, mouse neutrophils do not express GR-beta. Transfection of GR-beta into mouse neutrophils led to a significant reduction in the cell death rate when exposed to dexamethasone. Strickland et al. (2001) concluded that the high constitutive and proinflammatory cytokine-inducible upregulation of GR-beta in neutrophils enhances their survival during glucocorticoid treatment of inflammation. They proposed that this knowledge may help in the development of novel antiinflammatory strategies.

### Glucocorticoid Receptor-Gamma

[0395] Rivers et al. (1999) described GR-gamma, a novel variant of GCCR in which, as a result of alternative splicing, 3 bases are retained from the intron separating exons 3 and 4. These 3 bases code for an additional amino acid (arginine) in the DNA-binding domain of the receptor. Insertion of arginine at this site had previously been shown to decrease transcriptional activation by the GR to 48% that of GR-alpha (Ray et al., 1996). Analysis of cDNA from different tissues showed that GR-gamma is widely expressed at a relatively high level (between 3.8% and 8.7% of total GR).

[0396] Gehring et al. (1984 1985) achieved mapping of GRL to chromosome 5 by study of hybrids of a human lymphoblastic cell line (that is glucocorticoid-sensitive and contains glucocorticoid receptors of wildtype characteristics) and a mouse lymphoma cell line (that is resistant to lysis by glucocorticoids because of a mutant receptor that exhibits abnormal DNA binding).

[0397] Weinberger et al. (1985) used a cDNA clone in connection with a panel of somatic hybrid cells with various rearrangements involving chromosome 5 to assign GCCR to 5q11-q13. However, Francke and Foellmer (1989) demonstrated by in situ hybridization that the GRL gene is located on 5q31-q32. The new assignment is consistent with linkage to a DNA marker that maps to the same region (Giuffra et al. 1988) and also with human/mouse comparative mapping data. From family linkage studies, Giuffra et al. (1988) likewise concluded that the GRL locus is located toward the end of the long arm of chromosome 5.

[0398] Hollenberg et al. (1985) confirmed the assignment of a glucocorticoid receptor gene to chromosome 5 by Southern analysis of a hybrid cell line containing only chromosome 5. In addition, 2 fragments (formed with EcoRI and Hind III) were found in total human DNA and not in the hybrid line. To map these, Hollenberg et al. (1985) used a dual-laser fluorescence-activated cell sorter and spot-blotting. This confirmed the assignment to chromosome 5 and in addition showed hGR sequences on chromosome 16. The assignment to chromosome 16 was confirmed by Southern analysis of DNA from a mouse erythroleukemia cell line containing human chromosome 16. They concluded that both the alpha and beta receptor proteins are probably encoded by a single gene on chromosome 5 and generated by alternative splicing. In addition they concluded that a gene on chromosome 16 contains homology to the glucocorticoid receptor gene, at least between nucleotides 570 and 1,640. This could be the receptor gene for a related steroid, a processed gene or pseudogene, or a gene with other function that shares a domain with the GRL gene. See 138060.

[0399] Theriault et al. (1989) used in situ hybridization with a biotinylated cDNA probe to localize the human GRL gene to human chromosome 5q31. The assignment was confirmed by hybridization to chromosomes from an individual with a balanced reciprocal translocation (5;8)(q31;q13). Using chromosome-5-linked DNA probes to study somatic cell hybrids retaining partial chromosome 5 and clinical samples from patients with acquired deletions of 5q, Huebner et al. (1990) concluded that the GRL gene is telomeric to CSF2 (138960) and centromeric to CSF1R (164770)/PDGFRB (173410), near ECGF (131220).

[0400] Huizenza et al. (2000) described 5 patients with biochemical and clinical cortisol resistance. They found alterations in receptor number or ligand affinity and/or the ability of dexamethasone to inhibit mitogen-induced cell proliferation. To investigate the molecular defects leading to the clinical and biochemical pictures in these patients, they screened the GCCR gene using PCR-SSCP sequence analysis. No GCCR gene alterations were found in these patients. The authors concluded that alterations somewhere in the cascade of events starting with ligand binding to the GCCR protein, and finally resulting in the regulation of the expression of glucocorticoid-responsive genes, or postreceptor defects or interactions with other nuclear factors, form the pathophysiologic basis of cortisol resistance in these patients.

[0401] Inflammatory responses in many cell types are coordinately regulated by the opposing actions of NF-kappa-B (164011) and the glucocorticoid receptor. Webster et al. (2001) reported the identification of a tumor necrosis factor (TNF)-responsive NF-kappa-B DNA-binding site 5-prime to the GCCR promoter that leads to a 1.5-fold increase in GR-alpha mRNA and a 2.0-fold increase in GR-beta mRNA in HeLaS3 cells, which endogenously express both glucocorticoid receptor isoforms. However, TNF-alpha (191160) treatment disproportionately increased the steady-state levels of the GR-beta protein isoform over GR-alpha, making GR-beta the predominant endogenous receptor isoform. Similar results were observed following treatment of human lymphoid cells with TNF-alpha or interleukin-1 (IL1; see 147760). The increase in GR-beta protein expression correlated with the development of glucocorticoid resistance.

### Animal Model

[0402] Pepin et al. (1992) developed transgenic mice in which antisense RNA complementary to the 3-prime noncoding region of the glucocorticoid receptor mRNA led to reduced glucocorticoid receptor capacity and function, predominantly in neuronal tissue. Montkowski et al. (1995) demonstrated that the transgenic mice have profound behavioral changes and elevated plasma corticotropin concentrations in response to stress. Treatment with moclobemide, an inhibitor of monoamine oxidase type A (309850), reversed the behavioral deficits in this mouse model.

[0403] Since the glucocorticoid receptor can influence transcription both through DNA-binding-dependent and -independent mechanisms, Reichardt et al. (1998) attempted to separate these modes of action by introducing the arg458-to-thr point mutation into the glucocorticoid receptor by gene targeting using the Cre/loxP system. This mutation impairs dimerization and therefore GRE-dependent transactivation, while functions that require cross-talk with other transcription factors, such as transrepression of AP-1-driven genes, remain intact. In contrast to GR−/− mice, these mutants, termed GR-dim, are viable, revealing the in vivo relevance of DNA-binding-independent activities of the glucocorticoid receptor. The GR-dim/dim mice lose the ability to transactivate gene transcription by cooperative DNA binding but retain the repressing function of the corticosteroid receptor. Furthermore, the development and function of the adrenal medulla are not impaired in these mice.

[0404] The glucocorticoid receptor controls transcription of target genes both directly by interaction with DNA regulatory elements and indirectly by cross-talk with other transcription factors. In response to various stimuli, including stress, glucocorticoids coordinate metabolic, endocrine, immune, and nervous system responses and ensure an adequate profile of transcription. In the brain, glucocorticoid receptor has been thought to modulate emotional behavior, cognitive functions, and addictive states. These aspects could not be studied in the absence of functional glucocorticoid receptor because inactivation of the Grl1 gene in mice causes lethality at birth. Therefore, Tronche et al. (1999) generated tissue-specific mutations of this gene using the Cre/loxP-recombination system. This allowed them to generate viable adult mice with loss of glucocorticoid receptor function in selected tissues. Loss of glucocorticoid receptor function in the nervous system impaired regulation of the hypothalamus-pituitary-adrenal axis, resulting in increased glucocorticoid levels that lead to symptoms reminiscent of those observed in Cushing syndrome. Conditional mutagenesis of glucocorticoid receptor in the nervous system provided genetic evidence for the importance of glucocorticoid receptor signaling in emotional behavior because mutant animals showed an impaired behavioral response to stress and displayed reduced anxiety.

[0405] Using a tandem array of mouse mammary tumor virus reporter elements and a form of glucocorticoid receptor labeled with green fluorescent protein, McNally et al. (2000) observed targeting of the receptor to response elements in live mouse cells. Photobleaching experiments provided direct evidence that the hormone-occupied receptor undergoes rapid exchange between chromatin and the nucleoplasmic compartment. Thus, McNally et al. (2000) concluded that the interaction of regulatory proteins with target sites in chromatin is a more dynamic process than had been believed.

### 0.0001 Glucocorticoid Resistance, Familial [NR3C1, ASP641VAL]

[0406] In the kindred originally reported by Vingerhoeds et al. (1976) and studied by Chrousos et al. (1982, 1983) and Lipsett et al. (1985), Hurley et al. (1991) sequenced the glucocorticoid receptor from 3 affected members. A change at nucleotide 2054 predicted substitution of valine for aspartic acid at amino acid residue 641. The propositus was homozygous while the other relatives were heterozygous for the mutation. The point mutation was in the steroid-binding domain of the receptor.

### 0.0002 Glucocorticoid Resistance, Familial [NR3C1, IVS6DS, 4-BP DEL]

[0407] In all 3 affected members of a Dutch kindred, Karl et al. (1993) found that 1 NR3C1 allele had a 4-bp deletion that removed the donor splice site affecting the last 2 bases of the exon and the first 2 nucleotides of intron 6. The father and 3 of 5 children were affected. Affected members had hypercortisolism and approximately half of normal glucocorticoid receptors. The proband was a daughter with manifestations of hyperandrogenism. Furthermore, in the proband, in 1 of her affected brothers, and in her unaffected sister, Karl et al. (1993) found a single nucleotide substitution, asparagine to serine at codon 363 in exon 2 (G1220). Transfection studies indicated that the amino acid substitution did not alter the function of the glucocorticoid receptor. The presence of the null allele in this family was apparently compensated for by increased cortisol production at the expense of concurrent hyperandrogenism.

### 0.0003 Glucocorticoid Resistance, Cellular [NR3C1, LEU753PHE]

[0408] Ashraf and Thompson (1993) showed that 2 glucocorticoid-resistant cell lines were hemizygous for a leu753-to-phe mutation. Both were derived from a wildtype cell line heterozygous for this mutation; the resistant cell lines had suffered the loss of the normal allele.

[0409] 0.0007 Glucocorticoid Receptor Polymorphism [NR3C1, ASN363SER

[0410] Koper et al. (1997) identified a polymorphism, located at nucleotide position 1220 (AAT to AGT), that results in an asparagine-to-serine change in codon 363 of the NR3C1 protein. Huizenga et al. (1998) investigated whether this polymorphism is associated with altered sensitivity to glucocorticoids. In a group of 216 elderly persons, they identified 13 heterozygotes for the asn363-to-ser polymorphism by PCR/SSCP analysis. Thus, they found the polymorphism in 6.0% of the studied population. Huizenga et al. (1998) concluded that individuals carrying this polymorphism were clinically healthy, but had a higher sensitivity to exogenously administered glucocorticoids, with respect to both cortisol suppression and insulin response. Huizenga et al. (1998) speculated that life-long exposure to the mutated allele may be accompanied by an increased body mass index and a lowered bone mineral density in the lumbar spine with no effect on blood pressure.

[0411] Dobson et al. (2001) investigated the association between the 363S allele and risk factors for coronary heart disease and diabetes mellitus in a population of European origin living in the northeast of the United Kingdom. Blood samples from 135 males and 240 females were characterized for 363 allele status. The overall frequency of the 363S allele was 3.0%; 23 heterozygotes (7 males and 16 females) but no 363S homozygotes were identified. These data showed a significant association of the 363S allele with increased waist-to-hip ratio in males but not in females. This allele was not associated with blood pressure, body mass index, serum cholesterol, triglycerides, low-density lipoprotein and high-density lipoprotein cholesterol levels, or glucose tolerance status. The authors concluded that this GR polymorphism may contribute to central obesity in men.

[0412] Another sequence comprises sequence encoding Metapl1LOC165470 which is similar to methionine aminopeptidase-like 1.

[0413] Another sequence comprises sequence encoding TCF4: transcription factor 4.

[0414] TCF4 encodes transcription factor 4, a basic helix-turn-helix transcription factor. The protein recognizes an Ephrussi-box (‘E-box’) binding site (‘CANNTG’)—a motif first identified in immunoglobulin enhancers. TCF4 is expressed predominantly in pre-B-cells, although it is found in other tissues as well. TCF4 is known to produce multiple transcripts; however as the complete structure is only known for the transcript that encodes the b isoform, that is the variant presented here.

[0415] Another sequence comprises sequence encoding IMMUNOGLOBULIN TRANSCRIPTION FACTOR 2 (ITF2). This sequence maps to gene map locus 18q21.

[0416] Corneliussen et al. (1991) identified a family of nuclear proteins that bind to a motif of the glucocorticoid response element (GRE) in the enhancer of the murine leukemia virus SL3-3. This motif resembled those found in Ephrussi, or E, boxes (see 147141). Corneliussen et al. (1991) termed this family SEF2 for ‘SL3-3 enhancer factors 2.’ They cloned the gene encoding one of these proteins, SEF2-1B, from human thymocytes. Corneliussen et al. (1991) found that the SEF2-1B gene encodes a 667-amino acid polypeptide with homology to other basic helix-loop-helix (bHLH) transcription factors. Corneliussen et al. (1991) found multiple related mRNA species, presumed to be the result of differential splicing.

[0417] Henthorn et al. (1990) identified a helix-loop-helix transcription factor that bound to the mu-E5 motif of the immunoglobulin heavy chain enhancer and to the kappa-E2 motif found in the light chain enhancer, and designated it rm for ‘immunoglobulin transcription factor 2.’ nF2 encodes a predicted 623-amino acid protein (Henthorn et al., 1990).

[0418] Pscherer et al. (1996) isolated the promoter region of human somatostatin receptor 2 (SSTR2; 182452) and identified a novel initiator element. By screening a mouse brain cDNA expression library, Pscherer et al. (1996) isolated a transcription factor, which they termed SEF2, that bound to the E box of the SSTR2 initiator element. Sequencing revealed that this factor was the murine homolog of human SEF2-1B. DNA binding studies demonstrated that the basal transcription factor TFIIB (189963) can be tethered to the SSTR2 initiator element through physical interaction with SEF2. Northern blotting revealed that SEF2-1B is expressed in human adult and embryonic tissues including heart, brain, placenta, skeletal muscle, and lung.

[0419] In a search for polymorphic CTG repeats as candidate genes for bipolar disorder, Breschel et al. (1997) screened a genomic human chromosome 18-specific library and identified a 1.6-kb clone with a CTG(24) repeat that mapped to 18q21.1. The expansion was located in an intron of SEF2-1. The repeat was highly polymorphic in both bipolar and control subjects with an observed heterozygosity of 84%. Expansions of up to CTG(2100) were possible but were not associated with an obvious abnormal phenotype. The location of the repeat was determined by radiation hybrid mapping and by linkage analysis. Analysis of a mouse Sef2-1 gene showed that it contains 22 exons and that many of the introns are more than 10 kb long.

[0420] Another sequence comprises sequence encoding CRYZ: crystallin, zeta (quinone reductase); LOC348462. This sequence maps to gene map locus 1p31-p22. There are two sequences associated with CRYZ; Lab designation RA5A-re (SEQ ID NO: 317)-1q21.2 synaptotagmin XI; and Lab designation RA5B-re (SEQ ID NO: 316)-1p31.1 There are two genes: CRYZ and LOC348462- and cryz sits at the start of both.

[0421] Crystallins are separated into two classes: taxon-specific, or enzyme, and ubiquitous. The latter class constitutes the major proteins of vertebrate eye lens and maintains the transparency and refractive index of the lens. The former class is also called phylogenetically-restricted crystallins. This gene encodes a taxon-specific crystallin protein which has NADPH-dependent quinone reductase activity distinct from other known quinone reductases. It lacks alcohol dehydrogenase activity although by similarity it is considered a member of the zinc-containing alcohol dehydrogenase family. Unlike other mammalian species, in humans, lens expression is low. One pseudogene is known to exist.

[0422] In addition to the alpha, beta, and gamma crystallin families, which are present in the ocular lenses of all vertebrates, a number of other crystallins have been found to be present in high amounts in lenses from phylogenetically restricted groups. Most of these ‘taxon-specific’ crystallins are pyridine nucleotide-dependent oxidoreductases that are also present at enzymatic levels in nonlenticular tissues. The acquisition of this new function as a lens crystallin generally occurs without gene duplication and apparently without affecting the catalytic role of the enzyme. Zeta-crystallin/quinone reductase was initially described as a major protein in the lens of the guinea pig (Huang et al., 1987), in which a mutation in the gene is associated with hereditary cataracts (Rodriguez et al., 1992). It was later found to be also present in high amounts in the lens of camels (Garland et al., 1991) and at enzymatic levels in a number of nonlenticular tissues of various species. In the lens of guinea pigs and camels, it comprises about 10% of the total soluble protein. Gonzalez et al. (1994) isolated and characterized the human zeta-crystallin gene and its processed pseudogene. The functional gene is composed of 9 exons and spans about 20 kb. The 5-prime flanking region of the gene is rich in G and C (58%) and lacks TATA and CAAT boxes. Previous analysis of the guinea pig gene revealed the presence of 2 different promoters, one responsible for the high lens-specific expression and the other for expression at the enzymatic level in numerous tissues. A comparative analysis with the guinea pig gene showed that a region of approximately 2.5 kb that includes the promoter responsible for the high expression in the lens in the guinea pig is not present in the human gene.

[0423] By Southern analysis of human/mouse somatic cell hybrids, Heinzmann et al. (1994) assigned the CRYZ gene to human chromosome 1 and regionalized the assignment to 1p31-p22 by fluorescence in situ hybridization. They also identified 5 RFLPs.

[0424] Another sequence (Lab designation RA3_A_rE.txt (SEQ ID NO: 317)) comprises sequence encoding HM13; histocompatibility (minor) 13. This sequence maps to gene map locus 20q11.21.

[0425] Signal peptide peptidase, or SPP, catalyzes intramembrane proteolysis of some signal peptides after they have been cleaved from a preprotein. In humans, SPP activity is required to generate signal sequence-derived human lymphocyte antigen-E epitopes that are recognized by the immune system, and to process hepatitis C virus core protein. Weihofen et al. (2002) [PubMed 12077416] identified human SPP as a polytopic membrane protein with sequence motifs characteristic of the presenilin-type aspartic proteases. [supplied by OMIM]

[0426] Throughout this application, various publications are referenced. The disclosures of these publications in their-entireties, as well as the references cited in these publications, are hereby incorporated by reference into this application in order to more fully describe the state of the art to which this invention pertains. References containing the sequences of the proteins described herein are also cited throughout this application. These references and the sequence contained within these references are also hereby incorporated by reference for the purposes of describing the gene sequence, chromosomal location, structural properties and functional properties of the genes and gene products described herein.

### REFERENCES

[0427] Hicks, G. G. et al. “Functional genomics in mice by tagged sequence mutagenesis.” Nat Genet 16, 338-44. (1997).
[0428] Blay, J. & Brown, K. D. “Functional receptors for epidermal growth factor in an epithelial-cell line derived from the rat small intestine.” Biochem J 225, 85-94 (1985).
[0429] Blay, J. & Brown, K. D. “Epidermal growth factor promotes the chemotactic migration of cultured rat intestinal epithelial cells.” J Cell Pitysiol 124, 107-12 (1985).
[0430] Bell, A. C. & Felsenfeld, G. “Methylation of a CTCF-dependent boundary controls imprinted expression of the Igf2 gene.” Nature 405, 482-5. (2000).
[0431] Ohlsson, R., Renkawitz, R. & Lobanenkov, V. “CTCF is a uniquely versatile transcription regulator linked to epigenetics and disease.” Trends Genet 17, 520-7 (2001).
[0432] Oldham, S. M., Clark, G. J., Gangarosa, L. M., Coffey, R. J., Jr. & Der, C. J. “Activation of the Raf-1/MAP kinase cascade is not sufficient for Ras transformation of RIE-1 epithelial cells.” Proc Natl Acad Sci USA 93, 6924-8 (1996).
[0433] von Melchner, H., Reddy, S. & Ruley, H. E. “Isolation of cellular promoters by using a retrovirus promoter trap.” Proc Natl Acad Sci USA 87, 3733-7 (1990).
[0434] Ahmed, R. & Graham, A. F. “Persistent infections in L cells with temperature sensitive mutants of reovirus.” J Virol 23, 250-62 (1977).
[0435] Ahmed, R. et al. “Role of the host cell in persistent viral infection: coevolution of L cells and reovirus during persistent infection.” Cell 25, 325-32 (1981).
[0436] Morgan, D. O. et al. “Insulin-like growth factor II receptor as a multifunctional binding protein.” Nature 329, 301-7 (1987).
[0437] Tong, P. Y., Tollefsen, S. E. & Kornfeld, S. “The cation-independent mannose 6-phosphate receptor binds insulin-like growth factor II.” J Biol Chem. 263, 2585-8 (1988).
[0438] Bakay, M., Zhao, P., Chen, J. & Hoffman, E. P. “A web-accessible complete transcriptome of normal human and DMD muscle.” Neuromuscul Disord 12 Suppl 1, S125-41 (2002).
[0439] Hark, A. T. et al. “CTCF mediates methylation-sensitive enhancer-blocking activity at the H19/Igf2 locus.” Nature 405, 486-9 (2000).
[0440] Bell, A. C. & Felsenfeld, G. “Methylation of a CTCF-dependent boundary controls imprinted expression of the Igf2 gene.” Nature 405, 482-5 (2000).
[0441] McFall, A. et al. “Oncogenic Ras blocks anoikis by activation of a novel effector pathway independent of phosphatidylinositol 3-kinase.” Mol Cell Biol 21, 5488-99 (2001).
[0442] Wright, J. F., Kurosky, A. & Wasi, S. “An endothelial cell-surface form of annexin II binds human cytomegalovirus.” Biochem Biophys Res Commun 198, 983-9 (1994).
[0443] Zhao, W. Q. et al. “Secretion of Annexin II via activation of insulin receptor and insulin-like growth factor receptor.” J Biol Chem 278, 4205-15 (2003).
[0444] Nakagawa, H. et al. “Loss of imprinting of the insulin-like growth factor II gene occurs by biallelic methylation in a core region of H19-associated CTCF-binding sites in colorectal cancer.” Proc Natl Acad Sci USA 98, 591-6 (2001).
[0445] Rainier, S. et al. “Relaxation of imprinted genes in human cancer.” Nature 362, 747-9 (1993).
[0446] Arceci, R. J.; King, A. A.; Simon, M. C.; Orkin, S. H.; Wilson, D. B. “Mouse GATA-4: a retinoic acid-inducible GATA-binding transcription factor expressed in endodermally derived tissues and heart.” Molec. Cell. Biol. 13: 2235-2246, 1993.
[0447] Das, A. K.; Helps, N. R.; Cohen, P. T. W.; Barford, D. “Crystal structure of the protein serine/threonine phosphatase 2C at 2.0 angstrom resolution.” EMBO J. 15: 6798-6809, 1996.
[0448] Mann, D. J.; Campbell, D. G.; McGowan, C. H.; Cohen, P. T. W.: “Mammalian protein serine/threonine phosphatase 2C: cDNA cloning and comparative analysis of amino acid sequences.” Biochim. Biophys. Acta 1130: 100-104, 1992.
[0449] Takekawa, M.; Maeda, T.; Saito, H.: “Protein phosphatase 2C-alpha inhibits the human stress-responsive p38 and JNK MAPK pathways.” EMBO J. 17: 4744-4752, 1998.
[0450] Gradi, A.; Imataka, H.; Svitkin, Y. V.; Rom, E.; Raught, B.; Morino, S.; Sonenberg, N.: “A novel functional human eukaryotic translation initiation factor 4G.” Molec. Cell. Biol. 18: 334-342, 1998.
[0451] Imataka, H.; Gradi, A.; Sonenberg, N.: “A newly identified N-terminal amino acid sequence of human eIF4G binds poly(A)-binding protein and functions in poly(A)-dependent translation.” EMBO J. 17: 7480-7489, 1998.
[0452] Irurzun A, Sanchez-Palomino S, Novoa I, Carrasco L. “Monensin and nigericin prevent the inhibition of host translation by poliovirus, without affecting p220 cleavage.” J Virol 1995 December; 69 (12):7453-60
[0453] Raho G, Barone V, Rossi D, Philipson L, Sorrentino V. “The gas 5 gene shows four alternative splicing patterns without coding for a protein.” DIBIT, Istituto Scientifico San Raffaele, Milan, Italy. Gene 256 (1-2):13-7 Oct. 3, 2000.
[0454] Lai W S, Thompson M J, Blackshear P J. “Characteristics of the intron involvement in the mitogen-induced expression of Zfp-36.” J Biol Chem 273(1):506-17 1998 Jan. 2;
[0455] Hu, S.-I.; Carozza, M.; Klein, M.; Nantermet, P.; Luk, D.; Crowl, R. M.:
   “Human HtrA, an evolutionarily conserved serine protease identified as a differentially expressed gene product in osteoarthritic cartilage.” J. Biol. Chem. 273: 34406-34412, 1998.
[0456] Zumbrunn, J.; Trueb, B. “Localization of the gene for a serine protease with IGF-binding domain (PRSS11) to human chromosome” 10q25.3-q26.2. Genomics 45: 461-462, 1997.
[0457] Zumbrunn, J.; Trueb, B. “Primary structure of a putative serine protease specific for IGF-binding proteins.” FEBS Lett. 398: 187-192, 1996.
[0458] Johnson, K. R.; Merrick, W. C.; Zoll, W. L.; Zhu, Y. “Identification of cDNA clones for the large subunit of eukaryotic translation initiation factor 3: comparison of homologues from human, Nicotiana tabacum, Caenorhabditis elegans, and Saccharomyces cerevisiae.” J. Biol. Chem. 272: 7106-7113, 1997.
[0459] Osaka, F.; Kawasaki, H.; Aida, N.; Saeki, M.; Chiba, T.; Kawashima, S.; Tanaka, K.; Kato, S. “A new NEDD8-ligating system for cullin-4A.” Genes Dev. 12: 2263-2268, 1998.
[0460] Ye X Y, Ng T B “Isolation of a new cyclophilin-like protein from chickpeas with mitogenic, antifungal and anti-HIV-1 reverse transcriptase activities.” Life Sci 2002 Jan. 25; 70(10): 1129-38
[0461] Wang P, Cardenas M E, Cox G M, Perfect J R, Heitman J. “Two cyclophilin A homologs with shared and distinct functions important for growth and virulence of Cryptococcus neoformans.” EMBO Rep 2001 June; 2(6):511-8
[0462] Quintrell, N.; Lebo, R.; Varmus, H.; Bishop, J. M.; Pettenati, M. J.; Le Beau, M. M.; Diaz, M. O.; Rowley, J. D. “Identification of a human gene (HCK) that encodes a protein-tyrosine kinase and is expressed in hemopoietic cells.” Molec. Cell. Biol. 7: 2267-2275, 1987.
[0463] Ziegler, S. F.; Marth, J. D.; Lewis, D. B.; Perlmutter, R. M. “Novel protein-tyrosine kinase gene (hck) preferentially expressed in cells of hematopoietic origin.” Molec. Cell. Biol. 7: 2276-2285, 1987.
[0464] Deleuze, J. F.; Dhorne, S.; Hazan, J.; Borghi, E.; Raynaud, N.; Pollet, N.; Meunier-Rotival, M.; Deschatrette, J.; Alagille, D.; Hadchouel, M. “Deleted chromosome 20 from a patient with Alagille syndrome isolated in a cell hybrid through leucine transport selection: study of three candidate genes.” Mammalian Genome 5: 663-669, 1994.
[0465] Kaestner, K. H.; Hiemisch, H.; Luckow, B.; Schutz, G. “The HNF-3 gene family of transcription factors in mice: gene structure, cDNA sequence, and mRNA distribution.” Genomics 20: 377-385, 1994.
[0466] Mincheva, A.; Lichter, P.; Schutz, G.; Kaestner, K. H. “Assignment of the human genes for hepatocyte nuclear factor 3-alpha, -beta, and -gamma (HNP3A, HNF3B, HNP3G) to 14q12-q13, 20p11, and 19q13.2-q13.4.” Genomics 39: 417-419, 1997.
[0467] Nagase, T.; Ishikawa, K.; Miyajima, N.; Tanaka, A.; Kotani, H.; Nomura, N.; Ohara, O. “Prediction of the coding sequences of unidentified human genes. IX. The complete sequences of 100 new cDNA clones from brain which can code for large proteins in vitro.” DNA Res.”5: 31-39, 1998.
[0468] Nakamura, H.; Sudo, T.; Tsuiki, H.; Miyake, H.; Morisaki, T.; Sasaki, J.; Masuko, N.; Kochi, M.; Ushio, Y.; Saya, H. “Identification of a novel human homolog of the Drosophila dlg, P-dlg, specifically expressed in the gland tissues and interacting with p55.” FEBS Lett. 433: 63-67, 1998.
[0469] Aso, T.; Haque, D.; Fukudome, K.; Brower, C. S.; Conaway, J. W.; Conaway, R. C. “A human cDNA encoding the 110-kDa A subunit of RNA polymerase II transcription factor elongin.” Gene 168: 277-278, 1996.
[0470] Aso, T.; Lane, W. S.; Conaway, J. W.; Conaway, R. C. “Elongin (SIII): a multisubunit regulator of elongation by RNA polymerase II.” Science 269: 1439-1443, 1995.
[0471] Aso, T.; Mokady, N.; Haque, D.; Conaway, R. C.; Conaway, J. W. “Assignment of a human gene encoding the 110-kDa subunit of general transcription factor elongin (SIII) to chromosome 1p36.1.” Genomics 30: 393-394, 1995.
[0472] Duan, D. R.; Pause, A.; Burgess, W. H.; Aso, T.; Chen, D. Y. T.; Garrett, K. P.; Conaway, R. C.; Conaway, J. W.; Linehan, W. M.; Klausner, R. D. “Inhibition of transcription elongation by the VHL tumor suppressor protein.” Science 269: 1402-1406, 1995.
[0473] Kibel, A.; Iliopoulos, O.; DeCaprio, J. A.; Kaelin, W. G., Jr. “Binding of the von Hippel-Lindau tumor suppressor protein to elongin B and C.” Science 269: 1444-1446, 1995.
[0474] Kavsak, P.; Rasmussen, R. K.; Causing, C. G.; Bonni, S.; Zhu, H.; Thomsen, G. H.; Wrana, J. L. “Smad7 binds to Smurf2 to form an E3 ubiquitin ligase that targets the TGF-beta receptor for degradation.” Molec. Cell 6: 1365-1375, 2000.
[0475] Lallemand, F.; Mazars, A.; Prunier, C.; Bertrand, F.; Kornprost, M.; Gallea, S.; Roman-Roman, S.; Cherqui, G.; Atfi, A. “Smad7 inhibits the survival nuclear factor kappa-B and potentiates apoptosis in epithelial cells.” Oncogene 20: 879-884, 2001.
[0476] Roijer, E.; Moren, A.; ten Dijke, P.; Stenman, G. “Assignment of the Smad7 gene (MADH7) to human chromosome 18q21.1 by fluorescence in situ hybridization.” Cytogenet. Cell Genet. 81: 189-190, 1998.
[0477] Topper, J. N.; Cai, J.; Qiu, Y.; Anderson, K. R.; Xu, Y.-Y.; Deeds, J. D.; Feeley, R.; Gimeno, C. J.; Woolf, E. A.; Tayber, O.; Mays, G. G.; Sampson, B. A.; Schoen, F. J.; Gimbrone, M. A., Jr.; Falb, D. “Vascular MADs: two novel MAD-related genes selectively inducible by flow in human vascular endothelium. Proc. Nat. Acad.” Sci. 94: 9314-9319, 1997.
[0478] Groden, J.; Thliveris, A.; Samowitz, W.; Carlson, M.; Gelbert, L.; Albertsen, H.; Joslyn, G.; Stevens, J.; Spirio, L.; Robertson, M.; Sargeant, L.; Krapcho, K.; Wolff, E.; Burt, R.; Hughes, J. P.; Warrington, J.; McPherson, J.; Wasmuth, J.; Le Paslier, D.; Abderrahim, H.; Cohen, D.; Leppert, M.; White, R. “Identification and characterization of the familial adenomatous polyposis coli gene.” Cell 66: 589-600, 1991.
[0479] Horii, A.; Nakatsuru, S.; Ichii, S.; Nagase, I L; Nakamura, Y. “Multiple forms of the APC gene transcripts and their tissue-specific expression.” Hum. Molec. Genet. 2: 283-287, 1993.
[0480] Joslyn, G.; Carlson, M.; Thliveris, A.; Albertsen, H.; Gelbert, L.; Samowitz, W.; Groden, J.; Stevens, J.; Spirio, L.; Robertson, M.; Sargeant, L.; Krapcho, K.; Wolff, E.; Burt, R.; Hughes, J. P.; Warrington, J.; McPherson, J.; Wasmuth, J.; Le Paslier, D.; Abderrahim, H.; Cohen, D.; Leppert, M.; White, R. “Identification of deletion mutations and three new genes at the familial polyposis locus.” Cell 66: 601-613, 1991.
[0481] Larsen, N.; Samuelsson, T.; Swieb, C. “The Signal Recognition Particle Database (SRPDB).” Nucleic Acids Res. 26: 177-178, 1998.
[0482] Lingelbach, K; Zweib, C.; Webb, J.; Marshailsay, C.; Hoben, P.; Walter, P.; Dobberstein, B. “Isolation and characterization of a cDNA clone encoding the 19 kDa protein of signal recognition particle (SRP): expression and binding to 7SL RNA.” Nucleic Acids Res. 16 9431-9442, 1988.
[0483] Wild, K; Sinning, I.; Cusack, S. “Crystal structure of an early protein-RNA assembly complex of the signal recognition particle.” Science 294: 598-601, 2001.
[0484] Davis, D. B.; Delmonte, A. J.; Ly, C. T.; McNally, E. M. “Myoferlin, a candidate gene and potential modifier of muscular dystrophy.” Hum. Molec. Genet. 9: 217-226, 2000.
[0485] Hull, E.; Sarkar, M.; Spruijt, M. P. N.; Hoppener, J. W. M.; Dunn, R.; Schachter, H. “Organization and localization to chromosome 5 of the human UDP-N acetylglucosamine:alpha-3-D-mannoside beta-1,2-N-acetylglucosaminyltransferase 1 gene.” Biochem. Biophys. Res. Commun. 176: 608-615, 1991.
[0486] Ioffe, E.; Stanley, P. “Mice lacking N-acetylglucosaminyltransferase I activity die at mid-gestation, revealing an essential role for complex or hybrid N-linked carbohydrates.” Proc. Nat. Acad. Sci. 91: 728-732, 1994.
[0487] Kumar, R.; Stanley, P. “Transfection of a human gene that corrects the Lec1 glycosylation defect: evidence for transfer of the structural gene for N-acetylglucosaminyltransferase I.” Molec. Cell. Biol. 9: 5713-5717, 1989. Note: Erratum: Molec. Cell. Biol. 10: 3857 only, 1990.
[0488] Kumar, R.; Yang, J.; Eddy, R. L.; Byers, M. G.; Shows, T. B.; Stanley, P. “Cloning and expression of the murine gene and chromosomal location of the human gene encoding N-acetylglucosaminyltransferase I.” Glycobiology 2: 383-393, 1992.
[0489] Kumar, R.; Yang, J.; Larsen, R. D.; Stanley, P. “Cloning and expression of N-acetylglucosaminyltransferase L the medial Golgi transferase that initiates complex N-linked carbohydrate formation.” Proc. Nat. Acad. Sci. 87: 9948-9952, 1990.
[0490] Metzler, M.; Gertz, A.; Sarkar, M.; Schachter, H.; Schrader, J. W.; Marth, J. D. “Complex asparagine-linked oligosaccharides are required for morphogenic events during post-implantation development.” EMBO J. 13: 2056-2065, 1994.
[0491] Pownall, S.; Kozak, C. A.; Schappert, K.; Sarkar, M.; Hull, E.; Schachter, H.; Marth, J. D. “Molecular cloning and characterization of the mouse UDP-N-acetylglucosamine:alpha-3-D-mannoside beta-1,2-N-acetylglucosaminyltransferase I gene.” Genomics 12: 699-704, 1992.
[0492] Puthalakath, H.; Burke, J.; Gleeson, P. A. “Glycosylation defect in lec1 Chinese hamster ovary mutant is due to a point mutation in N-acetylglucosaminyltransferase 1 gene.” J. Biol. Chem. 271: 27818-27822, 1996.
[0493] Tan, J.; D'Agostaro, G. A. F.; Bendiak, B.; Reck, F.; Sarkar, M.; Squire, J. A.; Leong, P.; Schachter, H. “The human UDP-N-acetylglucosamine:alpha-6-D-mannoside-beta-1,2-N-acetylglucosaminyltransferase II gene (MGAT2): cloning of genomic DNA, localization to chromosome 14q21, expression in insect cells and purification of the recombinant protein.” Europ. J. Biochem. 231: 317-328, 1995.
[0494] Yip, B.; Chen, S.-H.; Mulder, H.; Hoppener, J. W. M.; Schachter, H. “Organization of the human beta-1,2-N-acetylglucosaminyltransferase I gene (MGAT1), which controls complex and hybrid N-glycan synthesis.” Biochem. J. 321: 465-474, 1997.
[0495] Takagaki, Y.; MacDonald, C. C.; Shenk, T.; Manley, J. L. “The human 64 kDa polyadenylylation (sic) factor contains a ribonucleoprotein-type RNA binding domain and unusual auxiliary motifs.” Proc. Nat. Acad. Sci. 89: 1403-1407, 1992.
[0496] Takagaki, Y.; Manley, J. L. “Levels of polyadenylation factor CstF-64 control IgM heavy chain mRNA accumulation and other events associated with B cell differentiation.” Molec. Cell 2: 761-771, 1998.
[0497] Takagaki, Y.; Seipelt, R. L.; Peterson, M. L.; Manley, J. L. “The polyadenylation factor CstF-64 regulates alternative processing of IgM heavy chain pre-mRNA during B cell differentiation.” Cell 87: 941-952, 1996.
[0498] Kapanadze, B.; Kashuba, V.; Baranova, A.; Rasool, O.; van Everdink, W.; Liu, Y.; Syomova, A.; Corcoran, M.; Poltaraus, A.; Brodyansky, V.; Syomova, N.; Kazakov, A.; Ibbotson, R.; van den Berg, A.; Gizatullin, R.; Fedorova, L.; Sulimova, G.; Zelenin, A.; Deaven, L.; Lehrach, H.; Grander, D.; Buys, C.; Oscier, D.; Zabarovsky, E. R.; Einhorn, S.; Yankovsky, N. “A cosmid and cDNA fine physical map of a human chromosome 13q14 region frequently lost in B-cell chronic lymphocytic leukemia and identification of a new putative tumor suppressor gene, Leu5.” FEBS Lett. 426: 266-270, 1998.
[0499] Liu, Y.; Hermanson, M.; Grander, D.; Merup, M.; Wu, X.; Heyman, M.; Rasool, O.; Juliusson, G.; Gahrton, G.; Detlofsson, R. “13q deletions in lymphoid malignancies.” Blood 86: 1911-1915, 1995.
[0500] Liu, Y.; Szekely, L.; Grander, D.; Soderhall, S.; Juliusson, G.; Gahrton, G.; Linder, S.; Einhorn, S. “Chronic lymphocytic leukemia cells with allelic deletions at 13q14 commonly have one intact RB1 gene: evidence for a role of an adjacent locus.” Proc. Nat. Acad. Sci. 90: 8697-8701, 1993.
[0501] Pahl, P. M. B.; Hodges, Y. K.; Meltesen, L.; Perryman, M. B.; Horwitz, K. B.; Horwitz, L. D. “ZNF207, a ubiquitously expressed zinc finger gene on chromosome 6p21.3.” Genomics 53: 410-412, 1998.
[0502] Deed, R. W.; Hirose, T.; Mitchell, E. L. D.; Santibanez-Koref, M. F.; Norton, J. D. “Structural organisation and chromosomal mapping of the human Id-3 gene.” Gene 151: 309-314, 1994.
[0503] Ellmeier, W.; Aguzzi, A.; Kleiner, E.; Kurzbauer, R.; Weith, A. “Mutually exclusive expression of a helix-loop-helix gene and N-myc in human neuroblastomas and in normal development.” EMBO J. 11: 2563-2571, 1992.
[0504] Kee, B. L.; Rivera, R. R.; Murre, C. “Id3 inhibits B lymphocyte progenitor growth and survival in response to TGF-beta.” Nature Immun. 2: 242-247, 2001.
[0505] Lyden, D.; Young, A. Z.; Zagzag, D.; Yan, W.; Gerald, W.; O'Reilly, R.; Bader, B. L.; Hynes, R. O.; Zhuang, Y.; Manova, K.; Benezra, R. “Id1 and 1d3 are required for neurogenesis, angiogenesis and vascularization of tumour xenografts.” Nature 401: 670-677, 1999.
[0506] Pan, L.; Sato, S.; Frederick, J. P.; Sun, X.-H.; Zhuang, Y. “Impaired immune responses and B-cell proliferation in mice lacking the Id3 gene.” Molec. Cell, Biol. 19: 5969-5980, 1999.
[0507] White, P. S.; Maris, J. M.; Beltinger, C.; Sulman, E.; Marshall, H. N.; Fujimori, M.; Kaufman, B. A.; Biegel, J. A.; Allen, C.; Hilliard, C.; Valentine, M. B.; Look, A. T.; Enomoto, H.; Sakiyama, S.; Brodeur, G. M. “A region of consistent deletion in neuroblastoma maps within human chromosome 1p36.2-36.3.” Proc. Nat. Acad. Sci. 92: 5520-5524, 1995.
[0508] Lam, E.; Martin, M.; Wiederrecht, G. “Isolation of a cDNA encoding a novel human FK506-binding protein homolog containing leucine zipper and tetratricopeptide repeat motifs.” Gene 160: 297-302, 1995.
[0509] Kitamura H. Kanehira K, Okita K, Morimatsu M, Saito M. “A novel nuclear I kappa B protein that potentiates LPS-induced IL-6 production.” FEBS Lett 17; 485(1):53-6 2000 Nov.
[0510] Bertin, J.; Nir, W.-J.; Fischer, C. M.; Tayber, O. V.; Errada, P. R.; Grant, J. R.; Keilty, J. J.; Gosselin, M. L.; Robison, K. E.; Wong, G. H. W.; Glucksmann, M. A.; DiStefano, P. S. “Human CARD4 protein is a novel CED4/Apaf-1 cell death family member that activates NF-kappa-B.” J. Biol. Chem. 274: 12955-12958, 1999.
[0511] Inohara, N.; Koseki, T.; del Peso, L.; Hu, Y.; Yee, C.; Chen, S.; Carrio, R.; Merino, I.; Liu, D.; Ni, J.; Nunez, G. “Nod1, an Apaf-1-like activator of caspase-9 and nuclear factor-kappa-B.” J. Biol. Chem. 274: 14560-14567, 1999.
[0512] Ge, B.; Gram, H.; Di Padova, F.; Huang, B.; New, L.; Ulevitch, R. J.; Luo, Y.; Han, J. “MAPKK-independent activation of p38-alpha mediated by TAB1-dependent autophosphorylation of p38-alpha.” Science 295: 1291-1294, 2002.
[0513] Shibuya, H.; Yamaguchi, K.; Shirakabe, K.; Tonegawa, A.; Gotoh, Y.; Ueno, N.; Irie, K.; Nishida, E.; Matsumoto, K. TAB1: an activator of the TAK1 MAPKKK in TGF-beta signal transduction. Science 272: 1179-1182, 1996.
[0514] Ge B, Gram H, Di Padova F, Huang B, New L, Ulevitch R J, Luo Y, Han J. “MAPKK-independent activation of p38alpha mediated by TAB1-dependent autophosphorylation of p38alpha.” Science; 295(5558):1291-4 2002 Feb. 15
[0515] Beck, S.; Hanson, I.; Kelly, A.; Pappin, D. J.; Trowsdale, J. “A homologue of the Drosophila female sterile homeotic (fsh) gene in the class II region of the human MHC.” DNA Sequence 2: 203-210, 1992.
[0516] Denis, G. V.; Green, M. R. “A novel, mitogen-activated nuclear kinase is related to a Drosophila developmental regulator.” Genes Dev. 10: 261-271, 1996.
[0517] Nomura, N.; Nagase, T.; Miyajima, N.; Sazuka, T.; Tanaka, A.; Sato, S.; Seki, N.; Kawarabayasi, Y.; Ishikawa, K.; Tabata, S. “Prediction of the coding sequences of unidentified human genes. II. The coding sequences of 40 new genes (KIAA0041-KIAA0080) deduced by analysis of cDNA clones from human cell line KG-1.” DNA Res. 1: 223-229, 1994.
[0518] Okamoto, N.; Ando, A.; Kawai, J.; Yoshiwara, T.; Tsuji, K.; Inoko, H. “Orientation of HLA-DNA gene and identification of a CpG island-associated gene adjacent to DNA in human major histocompatibility complex class II region.” Hum. Immun. 32: 221-228, 1991.
[0519] Thorpe, K. L.; Abdulla, S.; Kaufman, J.; Trowsdale, J.; Beck, S. “Phylogeny and structure of the RING3 gene.” Immunogenetics 44: 391-396, 1996.
[0520] Dorin, J. R.; Emslie, E.; van Heyningen, V. “Related calcium-binding proteins map to the same subregion of chromosome 1q and to an extended region of synteny on mouse chromosome 3.” Genomics 8: 420-426, 1990.
[0521] Ferrari, S.; Calabretta, B.; deRiel, J. K.; Battini, R.; Ghezzo, F.; Lauret, E.; Griffin, C.; Emanuel, B. S.; Gurrieri, F.; Baserga, R. “Structural and functional analysis of a growth-regulated gene, the human calcyclin.” J. Biol. Chem. 262: 8325-8332, 1987.
[0522] Oakey, R. J.; Watson, M. L.; Seldin, M. F. “Construction of a physical map on mouse and human chromosome 1: comparison of 13 Mb of mouse and 11 Mb of human DNA.” Hum. Molec. Genet. 1: 613-620, 1992.
[0523] Schafer, B. W.; Wicki, R.; Engelkamp, D.; Mattei, M.-G.; Heizmann, C. W. “Isolation of a YAC clone covering a cluster of nine S100 genes on human chromosome 1q21: rationale for a new nomenclature of the S100 calcium-binding protein family.” Genomics 25: 638-643, 1995.
[0524] Seldin, M. F. van Heyningen, V.; Emslie, E.; Dorin, J. R. “Related calcium binding proteins map to the same sub-region of chromosome 1q and to an extended region of synteny on mouse chromosome 3.” Cytogenet. Cell Genet. 51: 1095 only, 1989.
[0525] Pinol-Roma, S.; Swanson, M. S.; Gall, J. G.; Dreyfuss, G.: “A novel heterogeneous nuclear RNP protein with a unique distribution on nascent transcripts.” J. Cell Biol. 109: 2575-2587, 1989.
[0526] Crompton, M. R.; Moss, S. E.; Crumpton, M. J. “Diversity in the lipocortin/calpactin family.” Cell 55: 1-3, 1988.
[0527] Horlick, K. R.; Cheng, I. C.; Wong, W. T.; Wakeland, E. K.; Nick, H. S. “Mouse lipocortin I gene structure and chromosomal assignment: gene duplication and the origins of a gene family.” Genomics 10: 365-374, 1991.
[0528] Huebner, K.; Cannizzaro, L. A.; Croce, C. M.; Frey, A. Z.; Wallner, B. P.; Hecht, B. K.; Hecht, P. “Chromosome localization of the human genes for lipocortin I and the lipocortin II family. (Abstract) Cytogenet. Cell Genet. 46: 631 only, 1987.
[0529] Huebner, K.; Cannizzaro, L. A.; Frey, A. Z.; Hecht, B. K; Hecht, F.; Croce, C. M.; Wallner, B. P. “Chromosomal localization of the human genes for lipocortin I and lipocortin II.” Oncogene Res. 2: 299-310, 1988.
[0530] Kaplan, R.; Jaye, M.; Burgess, W. H.; Schlaepfer, D. D.; Haigler, H. T. “Cloning and expression of cDNA for human endonexin II, a Ca(2+) and phospholipid binding protein.” J. Biol. Chem. 263: 8037-8043, 1988.
[0531] Pepinsky, R. B.; Tizard, R.; Mattaliano, R. J.; Sinclair, L. K.; Miller, G. T.; Browning, J. L.; Chow, E. P.; Burne, C.; Huang, K.-S.; Pratt, D.; Wachter, L.; Hession, C.; Frey, A. Z.; Wallner, B. P. “Five distinct calcium and phospholipid binding proteins share homology with lipocortin I.” J. Biol. Chem. 263: 10799-10811, 1988.
[0532] Shohat, M.; Korenberg, J. R.; Schwabe, A. D.; Rotter, J. I. “Hypothesis: familial Mediterranean fever—a genetic disorder of the lipocortin family?” Am. J. Med. Genet. 34: 163-167, 1989.
[0533] Wallner, B. P.; Mattaliano, R. J.; Hession, C.; Cate, R. L.; Tizard, R.; Sinclair, L. K.; Foeller, C.; Chow, E. P.; Browning, J. L.; Ramachandran, K. L.; Pepinsky, R. B. “Cloning and expression of human lipocortin, a phospholipase A2 inhibitor with potential anti-inflammatory activity.” Nature 320: 77-81, 1986.
[0534] Walther, A.; Riehemann, K; Gerke, V. “A novel ligand of the formyl peptide receptor: annexin I regulates neutrophil extravasation by interacting with the FPR.” Molec. Cell 5: 831-840, 2000.
[0535] Blanchard, E. M.; Iizuka, K.; Christe, M.; Conner, D. A.; Geisterfer-Lowrance, A.; Schoen, F. J.; Maughan, D. W.; Seidman, C. E.; Seidman, J. G. “Targeted ablation of the murine alpha-tropomyosin gene.” Circulation Res. 81: 1005-1010, 1997.
[0536] Brown, J. H.; Kim, K.-H.; Jun, G.; Greenfield, N. J.; Dominguez, R.; Volkmann, N.; Hitchcock-DeGregori, S. E.; Cohen, C. “Deciphering the design of the tropomyosin molecule.” Proc. Nat. Acad. Sci. 98: 8496-8501, 2001.
[0537] Eyre, H.; Akkari, P. A.; Wilton, S. D.; Callen, D.C.; Baker, E.; Laing, N. G. “Assignment of the human skeletal muscle alpha-tropomyosin gene (TPM1) to band 15q22 by fluorescence in situ hybridization.” Cytogenet. Cell Genet. 69: 15-17, 1995.
[0538] “Karibe, A.; Tobacman, L. S.; Strand, J.; Butters, C.; Back, N.; Bachinski, L. L.; Arai, A. E.; Ortiz, A.; Roberts, R.; Homsher, E.; Fananapazir, L. “Hypertrophic cardiomyopathy caused by a novel alpha-tropomyosin mutation (V95A) is associated with mild cardiac phenotype, abnormal calcium binding to troponin, abnormal myosin cycling, and poor prognosis.” Circulation 103: 65-71, 2001.
[0539] Lees-Miller, J. P.; Helfman, D. M. “The molecular basis for tropomyosin isoform diversity.” BioEssays 13: 429-437, 1991.
[0540] MacLeod, A. R.; Gooding, C. “Human h™-alpha gene: expression in muscle and nonmuscle tissue.” Molec. Cell. Biol. 8: 433-440, 1988.
[0541] Muthuchamy, M.; Pieples, K.; Rethinasamy, P.; Hoit, B.; Grupp, I. L.; Boivin, G. P.; Wolska, B.; Evans, C.; Solaro, R. J.; Wieczorek, D. F. “Mouse model of a familial hypertrophic cardiomyopathy mutation in alpha-tropomyosin manifests cardiac dysfunction.” Circ. Res. 85: 47-56, 1999.
[0542] Schleef, M.; Werner, K.; Satzger, U.; Kaupmann, K.; Jockusch, H. “Chromosomal localization and genomic cloning of the mouse alpha-tropomyosin gene Tpm-1.” Genomics 17: 519-521, 1993.
[0543] Thierfelder, L.; Watkins, H.; MacRae, C.; Lamas, R.; McKenna, W.; Vosberg, H.-P.; Seidman, J. G.; Seidman, C. E. “Alpha-tropomyosin and cardiac troponin T mutations cause familial hypertrophic cardiomyopathy: a disease of the sarcomere.” Cell 77: 701-712, 1994.
[0544] Tiso, N.; Rampoldi, L.; Pallavicini, A.; Zimbello, R.; Pandolfo, D.; Valle, G.; Lanfranchi, G.; Danieli, G. A. “Fine mapping of five human skeletal muscle genes: alpha-tropomyosin, beta-tropomyosin, troponin-I slow-twitch, troponin-I fast-twitch, and troponin-C fast.” Biochem. Biophys. Res. Commun. 230: 347-350, 1997.
[0545] Watkins, H.; Anan, R.; Coviello, D. A.; Spirito, P.; Seidman, J. G.; Seidman, C. E.: “A de novo mutation in alpha-tropomyosin that causes hypertrophic cardiomyopathy.” Circulation 91: 2302-2305, 1995.
[0546] Watkins, H.; McKenna, W. J.; Thierfelder, L.; Suk, H. J.; Anan, R.; O'Donoghue, A.; Spirito, P.; Matsumori, A.; Moravec, C. S.; Seidman, J. G.; Seidman, C. E. “Mutations in the genes for cardiac troponin T and alpha-tropomyosin in hypertrophic cardiomyopathy.” New Eng. J. Med. 332: 1058-1064, 1995.
[0547] Gillespie, G. A. J.; Somlo, S.; Germino, G. G.; Weinstat-Saslow, D.; Reeders, S. T.: CpG island in the region of an autosomal dominant polycystic kidney disease locus defines the 5-prime end of a gene encoding a putative proton channel. Proc. Nat. Acad. Sci. 88: 4289-4293, 1991.
[0548] Bell, A. C.; Felsenfeld, G.:
   Methylation of a CTCF-dependent boundary controls imprinted expression of the Igf2 gene. Nature 405: 482-485, 2000.
[0549] Bell, A. C.; West, A. G.; Felsenfeld, G.: “The protein CTCF is required for the enhancer blocking activity of vertebrate insulators.” Cell 98: 387-396, 1999.
[0550] Chao, W.; Huynh, K. D.; Spencer, R. J.; Davidow, L. S.; Lee, J. T.: “CTCF, a candidate trans-acting factor for X-inactivation choice.” Science 295: 345-347, 2002.
[0551] Filippova, G. N.; Fagerlie, S.; Klenova, E. M.; Myers, C.; Dehner, Y.; Goodwin, G.; Neiman, P. E.; Collins, S. J.; Lobanenkov, V. V.: “An exceptionally conserved transcriptional repressor, CTCF, employs different combinations of zinc fingers to bind diverged promoter sequences of avian and mammalian c-myc oncogenes.” Molec. Cell. Biol. 16: 2802-2813, 1996.
[0552] Filippova, G. N.; Thienes, C. P.; Penn, B. H.; Cho, D. H.; Hu, Y. J.; Moore, J. M.; Klesert, T. R.; Lobanenkov, V. V.; Tapscott, S. J.:
   CTCF-binding sites flank CTG/CAG repeats and form a methylation-sensitive insulator at the DM1 locus. Nature Genet. 28: 335-343, 2001.
[0553] Hark, A. T.; Schoenherr, C. J.; Katz, D. J.; Ingram, R. S.; Levrose, J. M.; Tilghman, S. M.:
   CTCF mediates methylation-sensitive enhancer-blocking activity at the H19/Igf2 locus. Nature 405: 486-489, 2000.
[0554] Agulnik, A. I.; Zharkikh, A.; Boettger-Tong, H.; Bourgeron, T.; McElreavey, K.; Bishop, C. E.:
   Evolution of the DAZ gene family suggests that Y-linked DAZ plays little, or a limited, role in spermatogenesis but underlines a recent African origin for human populations. Hum. Molec. Genet. 7: 1371-1377, 1998.
[0555] Eberhart, C. G.; Maines, J. Z.; Wasserman, S. A.: Meiotic cell cycle requirement for a fly homologue of human Deleted in Azoospermia. Nature 381: 783-785, 1996.
[0556] Rugglu, M.; Speed, R.; Taggart, M.; McKay, S. J.; Kilanowski, F.; Saunders, P.; Derin, J.; Cooke, H. J.: The mouse Dazla gene encodes a cytoplasmic protein essential for gametogenesis. Nature 389: 73-77, 1997.
[0557] Saxena, R.; Brown, L. G.; Hawkins, T.; Alagappan, R. K.; Skaletsky, H.; Reeve, M. P.; Reijo, R.; Rozen, S.; Dinulos, M. B.; Disteche, C. M.; Page, D. C.: The DAZ gene cluster on the human Y chromosome arose from an autosomal gene that was transposed, repeatedly amplified and pruned. Nature Genet. 14: 292-299, 1996.
[0558] Shan, Z.; Hirschmann, P.; Seebacher, T.; Edelmann, A.; Jauch, A.; Morell, J.; Urbitsch, P.; Vogt, P. H.: A SPGY copy homologous to the mouse gene Dazla and the Drosophila gene boule is autosomal and expressed only in the human male gonad. Hum. Molec. Genet. 5: 2005-2011, 1996.
[0559] Slee, R.; Grimes, B.; Speed, R. M.; Taggart, M.; Maguire, S. M.; Ross, A.; McGill, N. I.; Saunders, P. T. K.; Cooke, H. J.: A human DAZ transgene confers partial rescue of the mouse Daz1 null phenotype. Proc. Nat. Acad. Sci. 96: 8040-8045, 1999.
[0560] Yen, P. H.; Chai, N. N.; Salido, E. C.: The human autosomal gene DAZLA: testis specificity and a candidate for male infertility. Hum. Molec. Genet. 5: 2013-2017, 1996.
[0561] Huebner, K.; Cannizzaro, L. A.; Croce, C. M.; Frey, A. Z.; Wallner, B. P.; Hecht, B. K.; Hecht, F.: Chromosome localization of the human genes for lipocortin I and the lipocortin II family. (Abstract) Cytogenet. Cell Genet. 46: 631 only, 1987.
[0562] Huebner, K.; Cannizzaro, L. A.; Frey, A. Z.; Hecht, B. K.; Hecht, F.; Croce, C. M.; Wallner, B. P.: Chromosomal localization of the human genes for lipocortin I and lipocortin II. Oncogene Res. 2: 299-310, 1988.
[0563] Richard, I.; Broux, O.; Chiannilkulchai, N.; Fougerousse, F.; Allamand, V.; Bourg, N.; Brenguier, L.; Devaud, C.; Pasturaud, P.; Roudaut, C.; Lorenzo, P.; Sebastiani-Kabatchis, C.; Schultz, R. A.; Polymeropoulos, M. H.; Gyapay, G.; Auffray, C.; Beckmann, J. S.: Regional localization of human chromosome 15 loci. Genomics 23: 619-627, 1994.
[0564] Spano, F.; Raugei, G.; Palla, E.; Colella, C.; Melli, M.:
   Characterization of the human lipocortin-2-encoding multigene family: its structure suggests the existence of a short amino acid unit undergoing duplication. Gene 95: 243-251, 1990.

[0565] Takahashi, S.; Reddy, S. V.; Chirgwin, J. M.; Devlin, R.; Haipek, C.; Anderson, J.; Roodman, G. D.: Cloning and identification of annexin II as an autocrine/paracrine factor that increases osteoclast formation and bone resorption. J. Biol. Chem. 269: 28696-28701, 1994.
[0566] Chellaiah, A.; Davis, A.; Mohanakumar, T.: Cloning of a unique human homologue of the Escherichia coli DNAJ heat shock protein. Biochim. Biophys. Acta 1174: 111-113, 1993.
[0567] Osaka, F.; Kawasaki, H.; Aida, N.; Saeki, M.; Chiba, T.; Kawashima, S.; Tanaka, K.; Kato, S.: A new NEDD8-ligating system for cullin-4A. Genes Dev. 12: 2263-2268, 1998.
[0568] Date, H.; Onodera, O.; Tanaka, H.; Iwabuchi, K; Uekawa, K.; Igarashi, S.; Koike, R.; Hiroi, T.; Yuasa, T.; Awaya, Y.; Sakai, T.; and 9 others: Early-onset ataxia with ocular motor apraxia and hypoalbuminemia is caused by mutations in a new HIT superfamily gene. Nature Genet. 29: 184-188, 2001.
[0569] Moreira, M.-C.; Barbot, C.; Tachi, N.; Kozuka, N.; Uchida, E.; Gibson, T.; Mendonca, P.; Costa, M.; Barros, J.; Yanagisawa, T.; Watanabe, M.; Ikeda, Y.; Aoki, M.; Nagata, T.; Coutinho, P.; Sequeiros, J.; Koenig, M.: The gene mutated in ataxia-oculomotor apraxia 1 encodes the new HIT/Zn-finger protein aprataxin. Nature Genet. 29: 189-193, 2001.
[0570] Ohkuma, Y.; Sumimoto, H.; Hoffmann, A.; Shimasaki, S.; Horikoshi, M.; Roeder, R. G.: Structural motifs and potential sigma homologies in the large subunit of human general transcription factor TFIIE. Nature 354: 398-401, 1991.
[0571] Peterson, M. G.; Inostroza, J.; Maxon, M. E.; Flores, O.; Admon, A.; Reinberg, D.; Tjian, R.: Structure and functional properties of human general transcription factor IIE. Nature 354: 369-373, 1991.
[0572] Yudkovsky, N.; Ranish, J. A.; Hahn, S.:
   A transcription reinitiation intermediate that is stabilized by activator. Nature 408: 225-229, 2000.
[0573] Umbricht, C. B.; Erdile, L. F.; Jabs, E. W.; Kelly, T. J.: Cloning, overexpression, and genomic mapping of the 14-kDa subunit of human replication protein A. J. Biol. Chem. 268: 6131-6138, 1993.
[0574] Umbricht, C. B.; Griffin, C. A.; Hawkins, A. L.; Grzeschik, K. H.; O'Connell, P.; Leach, R.; Green, E. D.; Kelly, T. J.: High-resolution genomic mapping of the three human replication protein A genes (RPA1, RPA2, and RPA3). Genomics 20: 249-257, 1994.
[0575] Erdile, L. F.; Heyer, W.-D.; Kolodner, R.; Kelly, T. J.: Characterization of a cDNA encoding the 70-kDa single-stranded DNA-binding subunit of human replication protein A and the role of the protein in DNA replication. J. Biol. Chem. 266: 12090-12098, 1991.
[0576] Gomes, X. V.; Wold, M. S.: Functional domains of the 70-kilodalton subunit of human replication protein A. Biochemistry 35: 10558-10568, 1996.
[0577] Miyamoto, Y.; Saito, Y.; Nakayama, M.; Shimasaki, Y.; Yoshimura, T.; Yoshimura, M.; Harada, M.; Kajiyama, N.; Kishimoto, I.; Kuwahara, K.; Hino, J.; Ogawa, E.; Hamanaka, I.; Kamitani, S.; Takahashi, N.; Kawakami, R.; Kangawa, K.; Yasue, H.; Nakao, K.: Replication protein A1 reduces transcription of the endothelial nitric oxide synthase gene containing a −786T-C mutation associated with coronary spastic angina. Hum. Molec. Genet. 9: 2629-2637, 2000.
[0578] Nakayama, M.; Yasue, H.; Yoshimura, M.; Shimasaki, Y.; Kugiyama, K.; Ogawa, H.; Motoyama, T.; Saito, Y.; Ogawa, Y.; Miyamoto, Y.; Nakao, K: T(−786)-C mutation in the 5-prime-flanking region of the endothelial nitric oxide synthase gene is associated with coronary spasm. Circulation 99: 2864-2870, 1999.
[0579] Shen, L. X.; Basilion, J. P.; Stanton, V. P., Jr.: Single-nucleotide polymorphisms can cause different structural folds of mRNA. Proc. Nat. Acad. Sci. 96: 7871-7876, 1999.
[0580] Umbricht, C. B.; Erdile, L. F.; Jabs, E. W.; Kelly, T. J.: Cloning, overexpression, and genomic mapping of the 14-kDa subunit of human replication protein A. J. Biol. Chem. 268: 6131-6138, 1993.
[0581] Umbricht, C. B.; Griffin, C. A.; Hawkins, A. L.; Grzeschik, K. H.; O'Connell, P.; Leach, R.; Green, E. D.; Kelly, T. J.:
   High-resolution genomic mapping of the three human replication protein A genes (RPA1, RPA2, and RPA3). Genomics 20: 249-257, 1994.
[0582] Acquati, F.; Malgaretti, N.; Hauptschein, R.; Rao, P.; Gaidano, G.; Taramelli, R.:
   A 2-Mb YAC contig linking the plasminogen-apoprotein(a) gene family to the insulin-like growth factor 2 receptor (IGF2R) gene on the telomeric region of chromosome 6 (6q26-q27). Genomics 22: 664-666, 1994.
[0583] Barlow, D. P.; Stoger, R.; Herrmann, B. G.; Saito, K; Schweifer, N.:
   The mouse insulin-like growth factor type-2 receptor is imprinted and closely linked to the Tme locus. Nature 349: 84-87, 1991.
[0584] DeChiara, T. M.; Robertson, E. J.; Efstratiadis, A.:
   Parental imprinting of the mouse insulin-like growth factor II gene. Cell 64: 849-859, 1991.
[0585] De Souza, A. T.; Hankins, G. R.; Washington, M. K.; Fine, R. L.; Orton, T. C.; Jirtle, R. L.:
   Frequent loss of heterozygosity on 6q at the mannose 6-phosphate/insulin-like growth factor II receptor locus in human hepatocellular tumors. Oncogene 10: 1725-1729, 1995.
[0586] De Souza, A. T.; Hankins, G. R.; Washington, M. K.; Orton, T. C.; Jirtle, R. L.:
   M6P/IGF2R gene is mutated in human hepatocellular carcinomas with loss of heterozygosity. Nature Genet. 11: 447-449, 1995.
[0587] Feinberg, A. P.:
   Genomic imprinting and gene activation in cancer. Nature Genet. 4: 110-113, 1993.
[0588] Haig, D.; Graham, C.:
   Genomic imprinting and the strange case of the insulin-like growth factor II receptor. Cell 64: 1045-1046, 1991.
[0589] Haig, D.; Westoby, M.:
   Parent-specific gene expression and the triploid endosperm. Am. Nat. 134: 147-155, 1989.
[0590] Kalscheuer, V. M.; Mariman, E. C.; Schepens, M. T.; Rehder, H.; Ropers, H.-H.:
   The insulin-like-growth factor type-2 receptor gene is imprinted in the mouse but not in humans. Nature Genet. 5: 7478, 1993.
[0591] Kiess, W.; Blickenstaff, G. D.; Sklar, M. M.; Thomas, C. L.; Nissley, S. P.; Sahagian, G. G.:
   Biochemical evidence that the type II insulin-like growth factor receptor is identical to the cation-independent mannose 6-phosphate receptor. J. Biol. Chem. 263: 9339-9344, 1988.
[0592] Killian, J. K.; Oka, Y.; Jang, H.-S.; Fu, X.; Waterland, R. A.; Sohda, T.; Sakaguchi, S.; Jirtle, R. L.:
   Mannose 6-phosphate/insulin-like growth factor 2 receptor (M6P/IGF2R) variants in American and Japanese populations. Hum. Mutat. 18: 25-31, 2001.
[0593] Kornfeld, S.; Mellman, I.:
   The biogenesis of lysosomes. Annu. Rev. Cell Biol. 5: 483-525, 1989.
[0594] Lau, M. M. H.; Stewart, C. E. H.; Liu, Z.; Bhatt, H.; Rotwein, P.; Stewart, C. L.:
   Loss of the imprinted IGF2/cation-independent mannose 6-phosphate receptor results in fetal overgrowth and perinatal lethality. Genes Dev. 8: 2953-2963, 1994.
[0595] Laureys, G.; Barton, D. E.; Ullrich, A.; Francke, U.:
   Chromosomal mapping of the gene for the type II insulin-like growth factor receptor/cation-independent mannose 6-phosphate receptor in man and mouse. Genomics 3: 224-229, 1988.
[0596] MacDonald, R. G.; Pfeffer, S. R.; Coussens, L.; Tepper, M. A.; Brocklebank, C. M.; Mole, J. E.; Anderson, J. K:
   A single receptor binds both insulin-like growth factor II and mannose-6-phosphate. Science 239: 1134-1137, 1988.
[0597] Morgan, D. O.; Edman, J. D.; Standring, D. N.; Fried, V. A.; Smith, M. C.; Roth, R. A.; Rutter, W. J.:
   Insulin-like growth factor II receptor as a multifunctional binding protein. Nature 329: 301-307, 1987.
[0598] Motyka, B.; Korbutt, G.; Pinkoski, M. J.; Heibein, J. A.; Caputo, A.; Hobman, M.; Barry, M.; Shostak, I.; Sawchuk, T.; Holmes, C. F. B.; Gauldie, J.; Bleackley, R. C.:
   Mannose 6-phosphate/insulin-like growth factor II receptor is a death receptor for granzyme B during cytotoxic T cell-induced apoptosis. Cell 103: 491-500, 2000.
[0599] Ogawa, O.; McNoe, L. A.; Eccles, M. R.; Morison, I. M.; Reeve, A. E.:
   Human insulin-like growth factor type I and type II receptors are not imprinted. Hum. Molec. Genet. 2: 2163-2165, 1993.
[0600] Oshima, A.; Nolan, C. M.; Kyle, J. W.; Grubb, J. H.; Sly, W. S.:
   The human cation-independent mannose 6-phosphate receptor: cloning and sequence of the full-length cDNA and expression of functional receptor in COS cells. J. Biol. Chem. 263: 2553-2562, 1988.
[0601] Puertollano, R.; Aguilar, R. C.; Gorshkova, I.; Crouch, R. J.; Bonifacino, J. S.:
   Sorting of mannose 6-phosphate receptors mediated by the GGAs. Science 292: 1712-1716, 2001.
[0602] Rao, P. H.; Murty, V. V. V. S.; Gaidano, G.; Hauptschein, R.; Dalla-Favera, R.; Chaganti, R. S. K.:
   Subregional mapping of 8 single copy loci to chromosome 6 by fluorescence in situ hybridization. Cytogenet. Cell Genet. 66: 272-273, 1994.
[0603] Roth, R. A.:
   Structure of the receptor for insulin-like growth factor II: the puzzle amplified. Science 239: 1269-1271, 1988.
[0604] Sleutels, F.; Zwart, R.; Barlow, D. P.:
   The non-coding Air RNA is required for silencing autosomal imprinted genes. Nature 415: 810-813, 2002.
[0605] Souza, R. F.; Appel, R.; Yin, J.; Wang, S.; Smolinski, K. N.; Abraham, J. M.; Zou, T.-T.; Shi, Y.-Q.; Lei, J.; Cottrell, J.; Cymes, K; Biden, K.; Simms, L.; Leggett, B.; Lynch, P. M.; Frazier, M.; Powell, S. M.; Harpaz, N.; Sugimura, H.; Young, J.; Meltzer, S. J.: Microsatellite instability in the insulin-like growth factor II receptor gene in gastrointestinal tumours. (Letter) Nature Genet. 14: 255-257, 1996.
[0606] Szebeny, G.; Rotwein, P.:
   The mouse insulin-like growth factor II/cation-independent mannose 6-phosphate (IGF-II/MPR) receptor gene: molecular cloning and genomic organization. Genomics 19: 120-129, 1994.
[0607] Tong, P. Y.; Tollefsen, S. E.; Kornfeld, S.:
   The cation-independent mannose 6-phosphate receptor binds insulin-like growth factor II. J. Biol. Chem. 263: 2585-2588, 1988.
[0608] Waheed, A.; Braulke, T.; Junghans, U.; von Figura, K.:
   Mannose 6-phosphate/insulin like growth factor II receptor: the two types of ligands bind simultaneously to one receptor at different sites. Biochem. Biophys. Res. Commun. 152: 1248-1254, 1988.
[0609] Xu, Y.; Goodyer, C. G.; Deal, C.; Polychronakos, C.:
   Functional polymorphism in the parental imprinting of the human IGF2R gene. Biochem. Biophys. Res. Commun. 197: 747-754, 1993.
[0610] Young, L. E.; Fernandes, K.; McEvoy, T. G.; Butterwith, S. C.; Gutierrez, C. G.; Carolan, C.; Broadbent, P. J.; Robinson, J. J.; Wilmut, I.; Sinclair, K. D.:
   Epigenetic change in IGF2R is associated with fetal overgrowth after sheep embryo culture. Nature Genet. 27: 153-154, 2001.
[0611] Zhu, Y.; Doray, B.; Poussu, A.; Lehto, V.-P.; Kornfeld, S. “Binding of GGA2 to the lysosomal enzyme sorting motif of the mannose 6-phosphate receptor.” Science 292: 1716-1718, 2001.
[0612] McGuinness, T.; Porteus, M. H.; Smiga, S.; Bulfone, A.; Kingsley, C.; Qiu, M.; Liu, J. K.; Long, J. E.; Xu, D.; Rubenstein, J. L. R. “Sequence, organization, and transcription of the Dlx-1 and the Dlx-2 locus. Genomics 35: 473-485, 1996.
[0613] Ozcelik, T.; Porteus, M. H.; Rubenstein, J. L. R.; Francke, U. “DLX2 (TES1), a homeobox gene of the Distal-less family, assigned to conserved regions on human and mouse chromosomes 2.” Genomics 13: 1157-1161, 1992.
[0614] Porteus, M. H.; Brice, A. E. J.; Bulfone, A.; Usdin, T. B.; Ciaranello, R. D.; Rubenstein, J. L. R. “Isolation and characterization of a library of cDNA clones that are preferentially expressed in the embryonic telencephalon.” Molec. Brain Res. 12: 7-22, 1992.
[0615] Qiu, M.; Bulfone, A.; Martinez, S.; Meneses, J. J.; Shimamura, K.; Pedersen, R. A.; Rubenstein, J. L. “Null mutation of Dlx-2 results in abnormal morphogenesis of proximal first and second branchial arch derivatives and abnormal differentiation in the forebrain.” Genes Dev. 9: 2523-2538, 1995.
[0616] Bray, P.; Lichter, P.; Thiesen, H.-J.; Ward, D.C.; Dawid, I. B. “Characterization and mapping of human genes encoding zinc finger proteins.” Proc. Nat. Acad. Sci. 88: 9563-9567, 1991.
[0617] Huebner, K.; Druck, T.; LaForgia, S.; Lasota, J.; Croce, C. M.; Lanfrancone, L.; Donti, B.; Pengue, G.; La Mantia, G.; Pelicci, P.-G.; Lania, L. “Chromosomal localization of four human zinc finger cDNAs.” Hum. Genet. 91: 217-222, 1993.
[0618] Lania, L.; Donti, E.; Pannuti, A.; Pascucci, A.; Pengue, G.; Feliciello, I.; La Mantia, G.; Lanfrancone, L.; Pelicci. P.-G. “cDNA isolation, expression analysis, and chromosomal localization of two human zinc finger genes.” Genomics 6: 333-340, 1990.
[0619] Thiesen, H.-J. “Multiple genes encoding zinc finger domains are expressed in human T cells.” New Biologist 2: 363-374, 1990.
[0620] Boise, L. H.; Gonzalez-Garcia, M.; Postema, C. E.; Ding, L.; Lindsten, T.; Turka, L. A.; Mao, X.; Nunez, G.; Thompson, C. B. “Bcl-x, a bcl-2-related gene that functions as a dominant regulator of apoptotic cell death.” Cell 74: 597-608, 1993.
[0621] Moliterno, A. R.; Hankins, W. D).; Spivak, J. L. “Impaired expression of the thrombopoietin receptor by platelets from patients with polycythemia vera.” New Eng. J. Med. 338: 572-580, 1998.
[0622] Shimizu, S.; Narita, M.; Tsujimoto, Y. “Bcl-2 family proteins regulate the release of apoptogenic cytochrome c by the mitochondrial channel VDAC.” Nature 399: 483-487, 1999.
[0623] Silva, M.; Richard, C.; Benito, A.; Sanz, C.; Olalla, I.; Fernandez-Luna, J. L. “Expression of Bcl-x in erythroid precursors from patients with polycythemia vera.” New Eng. J. Med. 338: 564-571, 1998.
[0624] Vander Heiden, M. G.; Chandel, N. S.; Williamson, E. K; Schumacker, P. T.; Thompson, C. B. “Bcl-X(L) regulates the membrane potential and volume homeostasis of mitochondria.” Cell 91: 627-637, 1997.
[0625] Bauer, W. O.; Nanda, I.; Beck, G.; Schmid, M.; Jakob, F. “Human puromycin-sensitive aminopeptidase: cloning of 3-prime UTR, evidence for a polymorphism at aa 140 and refined chromosomal localization to 17q21.” Cytogenet. Cell Genet. 92: 221-224, 2001.
[0626] Huber, G.; Thompson, A.; Gruninger, F.; Mechler, H.; Hochstrasser, R.; Hauri, H.-P.; Malherbe, P. “cDNA cloning and molecular characterization of human brain metalloprotease MP100: a beta-secretase candidate?” J. Neurochem. 72: 1215-1223, 1999.
[0627] Osada, T.; Sakaki, Y.; Takeuchi, T. “Puromycin-sensitive aminopeptidase gene (Psa) maps to mouse chromosome 11.” Genomics 56: 361-362, 1999.
[0628] Schonlein, C.; Loffler, J.; Huber, G. “Purification and characterization of a novel metalloprotease from human brain with the ability to cleave substrates derived from the N-terminus of beta-amyloid protein.” Biochem. Biophys. Res. Commun. 201: 45-53, 1994.
[0629] Thompson, M. W.; Tobler, A.; Fontana, A.; Hersh, L. B. “Cloning and analysis of the gene for the human puromycin-sensitive aminopeptidase.” Biochem. Biophys. Res. Commun. 258: 234-240, 1999.
[0630] Tobler, A. R.; Constam, D. B.; Schmitt-Graff, A.; Malipiero, U.; Schlapbach, R.; Fontana, A. “Cloning of the human puromycin-sensitive aminopeptidase and evidence for expression in neurons.” J. Neurochem. 68: 889-897, 1997.
[0631] Tait, J. F.; Frankenberry, D. A.; Miao, C. H.; Killary, A. M.; Adler, D. A.; Disteche, C. M. “Chromosomal localization of the human annexin III (ANX3) gene.” Genomics 10: 441-448, 1991.
[0632] Tait, J. F.; Smith, C.; Xu, L.; Cookson, B. T. “Structure and polymorphisms of the human annexin III (ANX3) gene.” Genomics 18: 79-86, 1993.
[0633] Liang, Y.; Tedder, T. F. “Identification of a CD20-, Fc-epsilon-RI-beta-related gene family: sixteen new MS4A family members expressed in human and mouse.” Genomics 72:119-127, 2001.
[0634] Huston, E.; Lumb, S.; Russell, A.; Catterall, C.; Ross, A. H.; Steele, M. R.; Bolger, G. B.; Perry, M. J.; Owens, R. J.; Houslay, M. D. “Molecular cloning and transient expression in COS7 cells of a novel human PDE4B cAMP-specific phosphodiesterase, HSPDE4B3.” Biochem. J. 328: 549-558, 1997.
[0635] Livi, G. P.; Kmetz, P.; McHale, M. M.; Cieslinski, L. B.; Sathe, G. M.; Taylor, D. P.; Davis, R. L.; Torphy, T. J.; Balcarek, J. M. “Cloning and expression of cDNA for a human low-K(m), rolipram-sensitive cyclic AMP phosphodiesterase.” Molec. Cell. Biol. 10: 2678-2686, 1990.
[0636] Milatovich, A.; Bolger, G.; Michaeli, T.; Francke, U. “Chromosome localizations of genes for five cAMP-specific phosphodiesterases in man and mouse.” Somat. Cell Molec. Genet. 20: 75-86, 1994.
[0637] Obernolte, R.; Bhakta, S.; Alvarez, R.; Bach, C.; Zuppan, P.; Mulkins, M.; Jarnagin, K; Shelton, E. R. “The cDNA of a human lymphocyte cyclic-AMP phosphodiesterase (PDE IV) reveals a multigene family.” Gene 129: 239-247, 1993.
[0638] Szpirer, C.; Szpirer, J.; Riviere, M.; Swinnen, J.; Vicini, E.; Conti, M. “Chromosomal localization of the human and rat genes (PDE4D and PDE4B) encoding the cAMP-specific phosphodiesterases 3 and 4.” Cytogenet. Cell Genet. 69: 11-14, 1995.
[0639] Xu, R. X.; Hassell, A. M.; Vanderwall, D.; Lambert, M. H.; Holmes, W. D.; Luther, M. A.; Rocque, W. J.; Milburn, M. V.; Zhao, Y.; Ke, H.; Nolte, R. T. “Atomic structure of PDE4: insights into phosphodiesterase mechanism and specificity.” Science 288: 1822-1825, 2000.
[0640] Ashraf, J.; Thompson, E. B. “Identification of the activation-labile gene: a single point mutation in the human glucocorticoid receptor presents as two distinct receptor phenotypes.” Molec. Endocr. 7: 631-642, 1993.
[0641] Bamberger, C. M.; Bamberger, A.-M.; de Castro, M.; Chrousos, G. P. “Glucocorticoid receptor beta, a potential endogenous inhibitor of glucocorticoid action in humans.” J. Clin. Invest 95: 2435-2441, 1995.
[0642] Bronnegard, M.; Werner, S.; Gustafsson, J.-A. “Primary cortisol resistance associated with a thermolabile glucocorticoid receptor in a patient with fatigue as the only symptom.” J. Clin. Invest. 78: 1270-1278, 1986.
[0643] Carlstedt-Duke, J.; Stromstedt P.-E.; Wrange, O.; Bergman, T.; Gustafsson, J.-A.; Jornvall, H. “Domain structure of the glucocorticoid receptor protein.” Proc. Nat. Acad. Sci. 84: 4437-4440, 1987.
[0644] Chrousos, G. P.; Renquist, D.; Brandon, D.; Eil, C.; Pugeat, M.; Vigersky, R.; Cutler, G. B., Jr.; Loriaux, D. L.; Lipsett, M. B. “Glucocorticoid hormone resistance during primate evolution: receptor-mediated mechanisms.” Proc. Nat. Acad. Sci. 79: 2036-2040, 1982.
[0645] Chrousos, G. P.; Vingerhoeds, A.; Brandon, D.; Eil, C.; Pugeat, M.; DeVroede, M.; Loriaux, D. L.; Lipsett, M. B. “Primary cortisol resistance in man: a glucocorticoid receptor-mediated disease.” J. Clin. Invest. 69: 1261-1269, 1982.
[0646] Chrousos, G. P.; Vingerhoeds, A. C. M.; Loriaux, D. L.; Lipsett, M. B. “Primary cortisol resistance: a family study.” J. Clin. Endocr. Metab. 56: 1243-1245, 1983.
[0647] Diamond, M. I.; Robinson, M. R.; Yamamoto, K. R. “Regulation of expanded polyglutamine protein aggregation and nuclear localization by the glucocorticoid receptor.” Proc. Nat. Acad. Sci. 97: 657-661, 2000.
[0648] Dobson, M. G.; Redfern, C. P. F.; Unwin, N.; Weaver, J. U. “The N363S polymorphism of the glucocorticoid receptor: potential contribution to central obesity in men and lack of association with other risk factors for coronary heart disease and diabetes mellitus.” J. Clin. Endocr. Metab. 86: 2270-2274, 2001.
[0649] Encio, I. J.; Detera-Wadleigh, S. D. “The genomic structure of the human glucocorticoid receptor.” J. Biol. Chem. 266: 7182-7188, 1991.
[0650] Francke, U.; Foellmer, B. E. “The glucocorticoid receptor gene is in 5q31-q32.” Genomics 4: 610-612, 1989.
[0651] Gehring, U.; Segnitz, B.; Foellmer, B.; Francke, U. “Chromosome assignment of the human gene for the glucocorticoid receptor (GRL).” (Abstract) Cytogenet. Cell Genet. 37: 476, 1984.
[0652] Gehring, U.; Segnitz, B.; Foellmer, B.; Francke, U. “Assignment of the human gene for the glucocorticoid receptor to chromosome 5.” Proc. Nat. Acad. Sci. 82: 3751-3755, 1985.
[0653] Giuffra, L. A.; Kennedy, J. L.; Castiglione, C. M.; Evans, R. M.; Wasmuth, J. J.; Kidd, K. K. “Glucocorticoid receptor maps to the distal long arm of chromosome 5.” Cytogenet. Cell Genet. 49: 313-314, 1988.
[0654] Hollenberg, S. M.; Weinberger, C.; Ong, E. S.; Cerelli, G.; Oro, A.; Lebo, R.; Thompson, E. B.; Rosenfeld, M. G.; Evans, R. M. “Primary structure and expression of a functional human glucocorticoid receptor cDNA.” Nature 318: 635-641, 1985.
[0655] Huebner, K.; Nagarajan, L.; Besa, E.; Angert, E.; Lange, B. J.; Cannizzaro, L. A.; van den Berghe, H.; Santoli, D.; Finan, J.; Croce, C. M.; Nowell, P. C. “Order of genes on human chromosome 5q with respect to 5q interstitial deletions.” Am. J. Hum. Genet. 46: 26-36, 1990.
[0656] Huizenga, N. A. T. M.; de Lange, P.; Koper, J. W.; Clayton, R. N.; Farrell, W. E.; van der Lely, A. J.; Brinkmann, A. O.; de Jong, F. H.; Lamberts, S. W. J. “Human adrenocorticotropin-secreting pituitary adenomas show frequent loss of heterozygosity at the glucocorticoid receptor gene locus.” J. Clin. Endocr. Metab. 83: 917-921, 1998.
[0657] Huizenga, N. A. T. M.; De Lange, P.; Koper, J. W.; De Herder, W. W.; Abs, R.; Kasteren, J. H. L. M. V.; De Jong, F. H.; Lamberts, S. W. J. “Five patients with biochemical and/or clinical generalized glucocorticoid resistance without alterations in the glucocorticoid receptor gene.” J. Clin. Endocr. Metab. 85: 2076-2081, 2000.
[0658] Huizenga, N. A. T. M.; Koper, J. W.; de Lange, P.; Pols, H. A. P.; Stolk, R. P.; Burger, H.; Grobbee, D. E.; Brinkmann, A. O.; de Jong, F. H.; Lamberts, S. W. J. “A polymorphism in the glucocorticoid receptor gene may be associated with an increased sensitivity to glucocorticoids in vivo.” J. Clin. Endocr. Metab. 83: 144-151, 1998.
[0659] Hurley, D. M.; Accili, D.; Stratakis, C. A.; Karl, M.; Vamvakopoulos, N.; Rorer, E.; Constantine, K.; Taylor, S. I.; Chrousos, G. P. “Point mutation causing a single amino acid substitution in the hormone binding domain of the glucocorticoid receptor in familial glucocorticoid resistance.” J. Clin. Invest. 87: 680-686, 1991.
[0660] Iida, S.; Gomi, M.; Moriwaki, K.; Itoh, Y.; Hirobe, K.; Matsuzawa, Y.; Katagiri, S.; Yonezawa, T.; Tarui, S. “Primary cortisol resistance accompanied by a reduction in glucocorticoid receptors in two members of the same family.” J. Clin. Endocr. Metab. 60: 967-971, 1985.
[0661] Karl, M.; Lamberts, S. W. J.; Detera-Wadleigh, S. D.; Encio, I. J.; Stratakis, C. A.; Hurley, D. M.; Accili, D.; Chrousos, G. P. “Familial glucocorticoid resistance caused by a splice site deletion in the human glucocorticoid receptor gene.” J. Clin. Endocr. Metab. 76: 683-689, 1993.
[0662] Kayes-Wandover, K.; White, P. C. “Steroidogenic enzyme gene expression in the human heart.” J. Clin. Endocr. Metab. 85: 2519-2525, 2000.
[0663] Kontula, K.; Pelkonen, R.; Andersson, L.; Sivula, A. “Glucocorticoid receptors in adrenocorticoid disorders.” J. Clin. Endocr. Metab. 51: 654-657, 1980.
[0664] Koper, J. W.; Stolk, R. P.; de Lange, P.; Huizenga, N. A.; Molijn, G. J.; Pols, H. A.; Grobbee, D. E.; Karl, M.; de Jong, F. H.; Brinkmann, A. O.; Lamberts, S. W. “Lack of association between five polymorphisms in the human glucocorticoid receptor gene and glucocorticoid resistance.” Hum. Genet. 99: 663-668, 1997.
[0665] Lamberts, S. W. J.; Poldermans, D.; Zweens, M.; de Jong, F. H. “Familial cortisol resistance: differential diagnostic and therapeutic aspects.” J. Clin. Endocr. Metab. 63: 1328-1333, 1986.
[0666] Lind, U.; Carlstedt-Duke, J.; Gustafsson, J.-A.; Wright, A. P. H. “Identification of single amino acid substitutions of cys-736 that affect the steroid-binding affinity and specificity of the glucocorticoid receptor using phenotypic screening in yeast.” Molec. Endocr. 10: 1358-1370, 1996.
[0667] Lipsett, M. B.; Chrousos, G. P.; Tomita, M.; Brandon, D. D.; Loriaux, D. L. “The defective glucocorticoid receptor in man and nonhuman primates.” Recent Prog. Horm. Res. 41: 199-247, 1985.
[0668] Lipsett, M. B.; Tomita, M.; Brandon, D. D.; De Vroede, M. M.; Loriaux, D. L.; Chrousos, G. P. “Cortisol resistance in man. In: Chrousos, G. P.; Loriaux, D. L.; Lipsett, M. B.: Steroid Hormone Resistance: Mechanisms and Clinical Aspects.” New York: Plenum Press (pub.) 1986. Pp. 97-109.
[0669] McNally, J. G.; Muller, W. G.; Walker, D.; Wolford, R.; Hager, G. L. “The glucocorticoid receptor: rapid exchange with regulatory sites in living cells.” Science 287: 1262-1265, 2000.
[0670] Montkowski, A.; Barden, N.; Wotjak, C.; Stec, I.; Ganster, J.; Meaney, M.; Engelmann, M.; Reul, J. M. H. M.; Landgraf, R.; Holsboer, F. “Long-term antidepressant treatment reduces behavioural deficits in transgenic mice with impaired glucocorticoid receptor function.” J. Neuroendocrinology 7: 841-845, 1995.
[0671] Muller, M.; Renkawitz, R. “Review: the glucocorticoid receptor.” Biochim. Biophys. Acta 1088: 171-182, 1991.
[0672] Nawata, H.; Sekiya, K.; Higuchi, K.; Kato, K.-I.; Ibayashi, H. “Decreased deoxyribonucleic acid binding of glucocorticoid-receptor complex in cultured skin fibroblasts from a patient with the glucocorticoid resistance syndrome.” J. Clin. Endocr. Metab. 65: 219-226, 1987.
[0673] Oakley, R. H.; Sar, M.; Cidlowski, J. A. “The human glucocorticoid receptor isoform: expression, biochemical properties, and putative function.” J. Biol. Chem. 271: 9550-9559, 1996.
[0674] Pepin, M.-C.; Pothier, F.; Barden, N. “Impaired type II glucocorticoid receptor function in mice bearing antisense RNA transgene.” Nature 355: 725-728, 1992.
[0675] Ray, D. W.; Davis, J. R. E.; White, A.; Clark, A. J. L. “Glucocorticoid receptor structure and function in glucocorticoid-resistant small cell lung carcinoma cells.” Cancer Res. 56: 3276-3280, 1996.
[0676] Reichardt, H. M.; Kaestner, K. H.; Tuckermann, J.; Kretz, O.; Wessely, O.; Bock, R.; Gass, P.; Schmid, W.; Herrlich, P.; Angel, P.; Schutz, G. “DNA binding of the glucocorticoid receptor is not essential for survival.” Cell 93: 531-541, 1998.
[0677] Rivers, C.; Levy, A.; Hancock, J.; Lightman, S.; Norman, M. “Insertion of an amino acid in the DNA-binding domain of the glucocorticoid receptor as a result of alternative splicing.” J. Clin. Endocr. Metab. 84: 4283-4286, 1999.
[0678] Roux, S.; Terouanne, B.; Balaguer, P.; Jausons-Loffreda, N.; Pons, M.; Chambon, P.; Gronemeyer, H.; Nicolas, J.-C. “Mutation of isoleucine 747 by a threonine alters the ligand responsiveness of the human glucocorticoid receptor.” Molec. Endocr. 10: 1214-1226, 1996.
[0679] Strickland, I.; Kisich, K; Hauk, P. J.; Vottero, A.; Chrousos, G. P.; Klemm, D. J.; Leung, D. Y. M. “High constitutive glucocorticoid receptor beta in human neutrophils enables them to reduce their spontaneous rate of cell death in response to corticosteroids.” J. Exp. Med. 193: 585-593, 2001.

[0680] Theriault, A.; Boyd, E.; Harrap, S. B.; Hollenberg, S. M.; Connor, J. M. “Regional chromosomal assignment of the human glucocorticoid receptor gene to 5q31.” Hum. Genet. 83: 289-291, 1989.
[0681] Theriault, A.; Harrap, S. B.; Hollenberg, S. M.; Boyd, E.; Connor, J. M. “Regional chromosomal assignment of the glucocorticoid receptor gene to 5q31.” (Abstract) Cytogenet. Cell Genet. 51: 1089, 1989.
[0682] Tronche, F.; Kellendonk, C.; Kretz, O.; Gass, P.; Anlag, K.; Orban, P. C.; Bock, R.; Klein, R.; Schutz, O. “Disruption of the glucocorticoid receptor gene in the nervous system results in reduced anxiety.” Nature Genet. 23: 99-103, 1999.
[0683] Vingerhoeds, A. C. M.; Thijssen, J. H. H.; Schwarz, F. “Spontaneous hypercortisolism without Cushing's syndrome.” J. Clin. Endocr. Metab. 43: 1128-1133, 1976.
[0684] Webster, J. C.; Oakley, R. H.; Jewell, C. M.; Cidlowski, J. A. “Proinflammatory cytokines regulate human glucocorticoid receptor gene expression and lead to the accumulation of the dominant negative beta-isoform: a mechanism for the generation of glucocorticoid resistance.” Proc. Nat. Acad. Sci. 98: 6865-6870, 2001.
[0685] Weinberger, C.; Evans, R.; Rosenfeld, M. G.; Hollenberg, S. M.; Skarecky, D.; Wasmuth, J. J. “Assignment of the human gene encoding the glucocorticoid receptor to the q11-q13 region on chromosome 5.” (Abstract) Cytogenet. Cell Genet. 40: 776, 1985.
[0686] Weinberger, C.; Giguere, V.; Hollenberg, S. M.; Thompson, C.; Arriza, J.; Evans, R. M. “Human steroid receptors and erb-A gene products form a superfamily of enhancer-binding proteins.” Clin. Physiol. Biochem. 5: 179-189, 1987.
[0687] Weinberger, C.; Hollenberg, S. M.; Ong, E. S.; Harmon, J. M.; Brower, S. T.; Cidlowski, J.; Thompson, E. B.; Rosenfeld, M. G.; Evans, R. M. “Identification of human glucocorticoid receptor complementary DNA clones by epitope selection.” Science 228: 740-742, 1985.
[0688] Weinberger, C.; Hollenberg, S. M.; Rosenfeld, M. G.; Evans, R. M. “Domain structure of human glucocorticoid receptor and its relationship to the v-erb-A oncogene product.” Nature 318: 670-672, 1985.
[0689] Breschel, T. S.; McInnis, M. G.; Margolis, R. L.; Sirugo, G.; Corneliussen, B.; Simpson, S. G.; McMahon, F. J.; MacKinnon, D. F.; Xu, J. F.; Pleasant, N.; Huo, Y.; Ashworth, R. G.; Grundstrom, C.; Grundstrom, T.; Kidd, K. K.; DePaulo, J. R.; Ross, C. A. “A novel, heritable, expanding CTG repeat in an intron of the SEF2-1 gene on chromosome 18q21.1.” Hum. Molec. Genet. 6: 1855-1863, 1997.
[0690] Corneliussen, B.; Thornell, A.; Hallberg, B.; Grundstrom, T. “Helix-loop-helix transcriptional activators bind to a sequence in glucocorticoid response elements of retrovirus enhancers.” J. Virol. 65: 6084-6093, 1991.
[0691] Henthorn, P.; Kiledjian, M.; Kadesch, T. “Two distinct transcription factors that bind the immunoglobulin enhancer mu-E5/kappa-E2 motif.” Science 247: 467-470, 1990.
[0692] Henthorn, P.; McCarrick-Walmsley, R.; Kadesch, T. “Sequence of the cDNA encoding ITF-2, a positive-acting transcription factor.” Nucleic Acids Res. 18: 678, 1990.
[0693] Pscherer, A.; Dorflinger, U.; Kirfel, J.; Gawlas, K; Ruschoff, J.; Buettner, R.; Schule, R. “The helix-loop-helix transcription factor SEF-2 regulates the activity of a novel initiator element in the promoter of the human somatostatin receptor II gene.” EMBO J. 15: 6680 6690, 1996.
[0694] Garland, D.; Rao, P. V.; Del Corso, A.; Mura, U.; Zigler, J. S., Jr. “Zeta-crystallin is a major protein in the lens of Camelus dromedarius.” Arch. Biochem. Biophys. 285: 134-136, 1991.
[0695] Gonzalez, P.; Rao, P. V.; Zigler, J. S., Jr. “Organization of the human zeta-crystallin/quinone reductase gene (CRYZ).” Genomics 21: 317-324, 1994.
[0696] Heinzmann, C.; Kojis, T. L.; Gonzalez, P.; Rao, P. V.; Zigler, J. S., Jr.; Polymeropoulos, M. H.; Klisak, I.; Sparkes, R. S.; Mohandas, T.; Bateman, J. B. “Assignment of the zeta-crystallin gene (CRYZ) to human chromosome 1p22-p31 and identification of restriction fragment length polymorphisms.” Genomics 23: 403-407, 1994.
[0697] Huang, Q.-L.; Russell, P.; Stone, S. H.; Zigler, J. S., Jr. “Zeta-crystallin, a novel lens protein from the guinea pig.” Curr. Eye Res. 6: 725-732, 1987.
[0698] Rodriguez, I. R.; Gonzalez, P.; Zigler, J. S., Jr.; Borras, T. “A guinea-pig hereditary cataract contains a splice site deletion in a crystallin gene.” Biochim. Biophys. Acta 1180: 44-52, 1992.
[0699] Sawamura, T.; Kume, N.; Aoyama, T.; Moriwaki, H.; Hoshikawa, H.; Aiba, Y.; Tanaka, T.; Miwa, S.; Katsura, Y.; Kita, T.; Masaki, T. “An endothelial receptor for oxidized low-density lipoprotein.” Nature 386:73-77, 1997.
[0700] Yamanaka, S.; Zhang, X.-Y.; Miura, K.; Kim, S.; Iwao, H. “The human gene encoding the lectin-type oxidized LDL receptor (OLR1) is a novel member of the natural killer gene complex with a unique expression profile.” Genomics 54: 191-199, 1998.

The application's sequence listing, which the Patent Office published only in electronic form, follows.

SEQUENCE LISTING (452 sequences)

SEQ ID NO: 1 - DNA, 828 bp, Artificial Sequence
  Description of Artificial Sequence: Note = Synthetic Construct
  misc_feature (24)..(24): n is a, c, g, or t
  misc_feature (33)..(33): n is a, c, g, or t
  misc_feature (37)..(37): n is a, c, g, or t
  misc_feature (40)..(40): n is a, c, g, or t
  misc_feature (53)..(53): n is a, c, g, or t
  misc_feature (77)..(77): n is a, c, g, or t
  misc_feature (88)..(88): n is a, c, g, or t
  misc_feature (122)..(122): n is a, c, g, or t
  misc_feature (164)..(164): n is a, c, g, or t
  misc_feature (171)..(172): n is a, c, g, or t
  misc_feature (224)..(224): n is a, c, g, or t
  misc_feature (294)..(294): n is a, c, g, or t
  misc_feature (344)..(344): n is a, c, g, or t
  misc_feature (358)..(358): n is a, c, g, or t
  misc_feature (624)..(624): n is a, c, g, or t
  misc_feature (782)..(782): n is a, c, g, or t
  misc_feature (804)..(804): n is a, c, g, or t
  misc_feature (812)..(812): n is a, c, g, or t
  misc_feature (816)..(816): n is a, c, g, or t
  misc_feature (819)..(819): n is a, c, g, or t
aaaaaaaaattaccatttttgggngaacctttnatanttngttcctagagggngagtcaggggtaaaaaaaacgatnaagggagttgnggcgattggagaagctattatgaagggataaaanacttaggttgagccggcgggtggggtgtattcttggggtggngaaaagnnagatcaacatgagatttttttgttttaggttttgcatgttgtaatgcaatantttaacctgattttatgtgcaggatgcctgaggtttgtgagcaggaacacaggaaaaggaacaccggtantcgaacaccggtgagtccgcgcagccgcagagaaggcgggtatcattcgntccaccctgtatgntaatatggagcgctacggccccgcccctggggccgatgggcccaaaaaggtagggttcgagaagacgtctgcatggagcagtggaccagtgaagacccaggcaaggccgaacgttgggccccgggccccgggggcgggtagcagggcccatacattgtccaagggctgctggagagcctggagcctcgctcccccaccggcgcaaagtggtacagcccatgggggcgtggcccatatcatggacgcgagcgcggccgccatcttgntctgcggtgctggtatttagagcgcagcgcctgactggcggggtcgccttcgcatccgccgcttcgagaatcttctttcgtctgctcgctctctctcccgtcgtcctagcccgccgccgcctgctgagcttgccctcttccccgcttgcagacatggnggacattgaaagaccctacctnaagggccngcangcnagaaaaagt

SEQ ID NO: 2 - DNA, 845 bp, Artificial Sequence
  Description of Artificial Sequence: Note = Synthetic Construct
  misc_feature (3)..(3): n is a, c, g, or t
  misc_feature (11)..(11): n is a, c, g, or t
  misc_feature (13)..(13): n is a, c, g, or t
  misc_feature (18)..(18): n is a, c, g, or t
  misc_feature (30)..(30): n is a, c, g, or t
  misc_feature (39)..(39): n is a, c, g, or t
  misc_feature (42)..(42): n is a, c, g, or t
  misc_feature (63)..(64): n is a, c, g, or t
  misc_feature (74)..(74): n is a, c, g, or t
  misc_feature (89)..(89): n is a, c, g, or t
  misc_feature (92)..(93): n is a, c, g, or t
  misc_feature (103)..(103): n is a, c, g, or t
  misc_feature (110)..(110): n is a, c, g, or t
  misc_feature (126)..(126): n is a, c, g, or t
  misc_feature (128)..(128): n is a, c, g, or t
  misc_feature (130)..(130): n is a, c, g, or t
  misc_feature (133)..(134): n is a, c, g, or t
  misc_feature (140)..(140): n is a, c, g, or t
  misc_feature (158)..(158): n is a, c, g, or t
  misc_feature (161)..(162): n is a, c, g, or t
  misc_feature (164)..(164): n is a, c, g, or t
  misc_feature (167)..(167): n is a, c, g, or t
  misc_feature (179)..(179): n is a, c, g, or t
  misc_feature (182)..(182): n is a, c, g, or t
  misc_feature (189)..(189): n is a, c, g, or t
  misc_feature (193)..(193): n is a, c, g, or t
  misc_feature (200)..(200): n is a, c, g, or t
  misc_feature (207)..(207): n is a, c, g, or t
  misc_feature (214)..(214): n is a, c, g, or t
  misc_feature (216)..(216): n is a, c, g, or t
  misc_feature (224)..(224): n is a, c, g, or t
  misc_feature (230)..(230): n is a, c, g, or t
  misc_feature (233)..(233): n is a, c, g, or t
  misc_feature (244)..(244): n is a, c, g, or t
  misc_feature (247)..(247): n is a, c, g, or t
  misc_feature (264)..(264): n is a, c, g, or t
  misc_feature (266)..(266): n is a, c, g, or t
  misc_feature (276)..(276): n is a, c, g, or t
  misc_feature (278)..(278): n is a, c, g, or t
  misc_feature (283)..(283): n is a, c, g, or t
  misc_feature (285)..(285): n is a, c, g, or t
  misc_feature (300)..(300): n is a, c, g, or t
  misc_feature (305)..(306): n is a, c, g, or t
  misc_feature (316)..(317): n is a, c, g, or t
  misc_feature (329)..(329): n is a, c, g, or t
  misc_feature (338)..(339): n is a, c, g, or t
  misc_feature (342)..(342): n is a, c, g, or t
  misc_feature (344)..(345): n is a, c, g, or t
  misc_feature (358)..(358): n is a, c, g, or t
  misc_feature (360)..(360): n is a, c, g, or t
  misc_feature (369)..(369): n is a, c, g, or t
  misc_feature (371)..(371): n is a, c, g, or t
  misc_feature (373)..(373): n is a, c, g, or t
  misc_feature (376)..(377): n is a, c, g, or t
  misc_feature (397)..(397): n is a, c, g, or t
  misc_feature (402)..(402): n is a, c, g, or t
  misc_feature (413)..(413): n is a, c, g, or t
  misc_feature (425)..(425): n is a, c, g, or t
  misc_feature (433)..(433): n is a, c, g, or t
  misc_feature (444)..(444): n is a, c, g, or t
  misc_feature (448)..(448): n is a, c, g, or t
  misc_feature (450)..(450): n is a, c, g, or t
  misc_feature (456)..(457): n is a, c, g, or t
  misc_feature (479)..(479): n is a, c, g, or t
  misc_feature (482)..(482): n is a, c, g, or t
  misc_feature (494)..(494): n is a, c, g, or t
  misc_feature (497)..(498): n is a, c, g, or t
  misc_feature (500)..(500): n is a, c, g, or t
  misc_feature (523)..(523): n is a, c, g, or t
  misc_feature (526)..(526): n is a, c, g, or t
  misc_feature (532)..(533): n is a, c, g, or t
  misc_feature (538)..(538): n is a, c, g, or t
  misc_feature (548)..(548): n is a, c, g, or t
  misc_feature (553)..(553): n is a, c, g, or t
  misc_feature (555)..(555): n is a, c, g, or t
  misc_feature (558)..(558): n is a, c, g, or t
  misc_feature (566)..(566): n is a, c, g, or t
  misc_feature (583)..(583): n is a, c, g, or t
  misc_feature (589)..(589): n is a, c, g, or t
  misc_feature (591)..(591): n is a, c, g, or t
  misc_feature (595)..(595): n is a, c, g, or t
  misc_feature (601)..(601): n is a, c, g, or t
  misc_feature (604)..(604): n is a, c, g, or t
  misc_feature (624)..(624): n is a, c, g, or t
  misc_feature (633)..(633): n is a, c, g, or t
  misc_feature (642)..(642): n is a, c, g, or t
  misc_feature (653)..(653): n is a, c, g, or t
  misc_feature (659)..(659): n is a, c, g, or t
  misc_feature (665)..(665): n is a, c, g, or t
  misc_feature (676)..(677): n is a, c, g, or t
  misc_feature (688)..(688): n is a, c, g, or t
  misc_feature (698)..(698): n is a, c, g, or t
  misc_feature (700)..(700): n is a, c, g, or t
  misc_feature (703)..(703): n is a, c, g, or t
  misc_feature (705)..(705): n is a, c, g, or t
  misc_feature (711)..(711): n is a, c, g, or t
  misc_feature (722)..(722): n is a, c, g, or t
  misc_feature (742)..(742): n is a, c, g, or t
  misc_feature (745)..(745): n is a, c, g, or t
  misc_feature (753)..(753): n is a, c, g, or t
  misc_feature (760)..(760): n is a, c, g, or t
  misc_feature (765)..(766): n is a, c, g, or t
  misc_feature (778)..(780): n is a, c, g, or t
  misc_feature (788)..(789): n is a, c, g, or t
  misc_feature (791)..(791): n is a, c, g, or t
  misc_feature (815)..(815): n is a, c, g, or t
  misc_feature (828)..(829): n is a, c, g, or t
tcncctaaganangaganaggttagatggnaatggagantanataccgggcttagcttcgccnnggacccaccnaggggaaaagagccntcnngcaacaaacnaaaggancggaaagaggaagggnangnggnnaaacanattgggcgaatttaaaanctnngnccngtttgaaatagngcncggccgntccntgggccngatccanccttccntnacttttcntccccngcnttaaattgcgncgncggcccccccaaccatntnttccgttttnancaccngnggccccggcagtgcngatgnnggggaattgnnaatgccccccanccattttgnntcngnncctggggagagantnaaacggtgngngnagnngttaatatggcggcagcggngacancagtagccagngcaggcacgcgnagttggcnggggacgccangtgncnggaganntggagcggcggcggagcgggcnccnaaaaaaaaaaanaanngntggtaagggggcccggggtgganganatttcnngggcngcttctaggngtcangntgnggccgctncgttcggccctggatgnagcccngngccngtgccnccnccggggggagtttgtttccntctaccgtnccctgctgnggagcgacganctgcantccccnggagcgtctannaggccgtggcnaaccccatcnangcncnccagtnagcttccttcntcccgacatagtaggcgtcnggnggcgttgncgacagnggccnncgtcgatgggannntctatttnngnttcatgggccgtatgttagacctntcgaaggacgcgnnaaatagataggggggg

SEQ ID NO: 3 - DNA, 818 bp, Artificial Sequence
  Description of Artificial Sequence: Note: = synthetic construct
  misc_feature (11)..(11): n is a, c, g, or t
  misc_feature (13)..(13): n is a, c, g, or t
  misc_feature (34)..(34): n is a, c, g, or t
  misc_feature (36)..(36): n is a, c, g, or t
  misc_feature (40)..(40): n is a, c, g, or t
  misc_feature (46)..(46): n is a, c, g, or t
  misc_feature (60)..(60): n is a, c, g, or t
  misc_feature (68)..(68): n is a, c, g, or t
  misc_feature (97)..(97): n is a, c, g, or t
  misc_feature (99)..(99): n is a, c, g, or t
  misc_feature (117)..(117): n is a, c, g, or t
  misc_feature (129)..(131): n is a, c, g, or t
  misc_feature (133)..(137): n is a, c, g, or t
  misc_feature (160)..(160): n is a, c, g, or t
  misc_feature (168)..(168): n is a, c, g, or t
  misc_feature (170)..(170): n is a, c, g, or t
  misc_feature (176)..(176): n is a, c, g, or t
  misc_feature (184)..(185): n is a, c, g, or t
  misc_feature (199)..(199): n is a, c, g, or t
  misc_feature (209)..(209): n is a, c, g, or t
  misc_feature (214)..(214): n is a, c, g, or t
  misc_feature (222)..(223): n is a, c, g, or t
  misc_feature (227)..(227): n is a, c, g, or t
  misc_feature (238)..(239): n is a, c, g, or t
  misc_feature (242)..(245): n is a, c, g, or t
  misc_feature (284)..(286): n is a, c, g, or t
  misc_feature (298)..(298): n is a, c, g, or t
  misc_feature (326)..(326): n is a, c, g, or t
  misc_feature (329)..(329): n is a, c, g, or t
  misc_feature (363)..(363): n is a, c, g, or t
  misc_feature (381)..(381): n is a, c, g, or t
  misc_feature (447)..(447): n is a, c, g, or t
  misc_feature (460)..(460): n is a, c, g, or t
  misc_feature (462)..(462): n is a, c, g, or t
  misc_feature (470)..(470): n is a, c, g, or t
  misc_feature (775)..(775): n is a, c, g, or t
  misc_feature (780)..(780): n is a, c, g, or t
  misc_feature (789)..(789): n is a, c, g, or t
tacacctttgngngtgttgaaaattacggggganangaanaaaaangtatccttttggangccccggnctcttgtggaatttgtgatttacggcggnantcatatgatttcggaaanaagataaagccnnncnnnnnggggtagggaagaaggattttgnaaacaaantntgggtntatataanngtgggggggggagntcattgaggnggggnggaatatnnaatnttttttttttnnttnnnnggcaagagggatgaaggtaaggttagtatgaaatggccnnnccagagaagttngatgaaaaagatagtgccaccaagaganatnatttgttatttttaacagtggggggaggtagttntagaccaccatttattanaactgaggcacaaagaagatgattggggggcacttacagagtaagcagtatttacataaagatttnttccccaggaatnangaggaagntggataactgaacaaagccatgtaagcaggctttttggtatgcatgtggtcccattacaaggaatacccaataaatagcaaatgcacactgccattcacaagcaattgcagagaatgggtgggggatgtgaaactaaagagctttgtagctgcctgaggaggtgggttctctatatccgtgggagctagtgatcccccacaggtcttagctggtgccatgattgtgatcttaggccagatttgatgtcccccacatggccgagtccgccatggatgcaacagggcagctttatttgctgtgggcnggtantgaaggatntcacaaatgaacttggcaagtagagaggt

SEQ ID NO: 4 - DNA, 857 bp, Artificial Sequence
  Description of Artificial Sequence: Note: = synthetic construct
  misc_feature (9)..(9): n is a, c, g, or t
  misc_feature (12)..(12): n is a, c, g, or t
  misc_feature (14)..(14): n is a, c, g, or t
  misc_feature (22)..(22): n is a, c, g, or t
  misc_feature (27)..(29): n is a, c, g, or t
  misc_feature (39)..(40): n is a, c, g, or t
  misc_feature (43)..(44): n is a, c, g, or t
  misc_feature (46)..(46): n is a, c, g, or t
  misc_feature (50)..(50): n is a, c, g, or t
  misc_feature (55)..(55): n is a, c, g, or t
  misc_feature (62)..(65): n is a, c, g, or t
  misc_feature (74)..(74): n is a, c, g, or t
  misc_feature (78)..(79): n is a, c, g, or t
  misc_feature (84)..(84): n is a, c, g, or t
  misc_feature (87)..(87): n is a, c, g, or t
  misc_feature (104)..(104): n is a, c, g, or t
  misc_feature (108)..(108): n is a, c, g, or t
  misc_feature (114)..(114): n is a, c, g, or t
  misc_feature (124)..(124): n is a, c, g, or t
  misc_feature (130)..(131): n is a, c, g, or t
  misc_feature (133)..(133): n is a, c, g, or t
  misc_feature (135)..(135): n is a, c, g, or t
  misc_feature (137)..(137): n is a, c, g, or t
  misc_feature (140)..(141): n is a, c, g, or t
  misc_feature (146)..(146): n is a, c, g, or t
  misc_feature (149)..(149): n is a, c, g, or t
  misc_feature (151)..(151): n is a, c, g, or t
  misc_feature (161)..(161): n is a, c, g, or t
  misc_feature (163)..(163): n is a, c, g, or t
  misc_feature (196)..(196): n is a, c, g, or t
  misc_feature (206)..(206): n is a, c, g, or t
  misc_feature (213)..(213): n is a, c, g, or t
  misc_feature (215)..(215): n is a, c, g, or t
  misc_feature (217)..(217): n is a, c, g, or t
  misc_feature (223)..(223): n is a, c, g, or t
  misc_feature (225)..(225): n is a, c, g, or t
  misc_feature (238)..(238): n is a, c, g, or t
  misc_feature (267)..(267): n is a, c, g, or t
  misc_feature (289)..(289): n is a, c, g, or t
  misc_feature (299)..(299): n is a, c, g, or t
  misc_feature (335)..(335): n is a, c, g, or t
  misc_feature (351)..(351): n is a, c, g, or t
  misc_feature (365)..(365): n is a, c, g, or t
  misc_feature (373)..(373): n is a, c, g, or t
  misc_feature (380)..(380): n is a, c, g, or t
  misc_feature (429)..(429): n is a, c, g, or t
  misc_feature (445)..(445): n is a, c, g, or t
  misc_feature (464)..(464): n is a, c, g, or t
  misc_feature (503)..(503): n is a, c, g, or t
  misc_feature (509)..(509): n is a, c, g, or t
  misc_feature (585)..(585): n is a, c, g, or t
  misc_feature (624)..(624): n is a, c, g, or t
  misc_feature (626)..(626): n is a, c, g, or t
  misc_feature (673)..(673): n is a, c, g, or t
  misc_feature (684)..(684): n is a, c, g, or t
  misc_feature (689)..(689): n is a, c, g, or t
tggaaagantgngntaaagttnagttnnnagatattgannaanntngggnaaaanaaggtgnnnnacaatctcncaannatttnaangaagggggaataaatgnaaantggganttaaaaaaanaggggnnanangnttnnggttnaananaaggggggtntncccgttttttttttaggatcctgggagtaaccnacaggaaccnaaaattngnanaagggngntccttcccttccngtcagtaagggatggggccctatttttancaacgaacaccattgacagganaccggtcagnattccgttaagtattttgacctttccaggggatgtntccgcacagccgttgngaccttaaacgcgnccagattntgcgaangtcattttgggaatgactgttgtagacactgcttttttagtcgcagatntgaccgcagattttcntttcccaccttatgtccgntggagcagtggtggccggagaaaatttcttggggttccntcccgngacccaaagaacacaactgttctcgctgcccggcacccatcgccacgtcagctcacgctcgcgacgccagcacgcntgcgcgcagagaaaggcggagcatgcgcaaaggcctgcntntaacatccggggctcgggcggcggcgctgccgccgcgagggattaanggggtctttcntttcngtctctggccggctgggcgcgggcgactgctggcgaggcgcgtggaagctcgcgatagttcccctccgcctcctcttcccggtccaggccactagggagttcgctgacgccgggtgaactgagcgtaccgcctgaaagaccccacaagtaggtttggcaagtagaaag

SEQ ID NO: 5 - DNA, 896 bp, Artificial Sequence
  Description of Artificial Sequence: Note = Synthetic Construct
  misc_feature (17)..(17): n is a, c, g, or t
  misc_feature (29)..(29): n is a, c, g, or t
  misc_feature (34)..(34): n is a, c, g, or t
  misc_feature (41)..(41): n is a, c, g, or t
  misc_feature (60)..(60): n is a, c, g, or t
  misc_feature (82)..(83): n is a, c, g, or t
  misc_feature (105)..(105): n is a, c, g, or t
  misc_feature (121)..(121): n is a, c, g, or t
  misc_feature (130)..(130): n is a, c, g, or t
  misc_feature (137)..(137): n is a, c, g, or t
  misc_feature (142)..(144): n is a, c, g, or t
  misc_feature (147)..(147): n is a, c, g, or t
  misc_feature (150)..(150): n is a, c, g, or t
  misc_feature (155)..(155): n is a, c, g, or t
  misc_feature (160)..(160): n is a, c, g, or t
  misc_feature (201)..(201): n is a, c, g, or t
  misc_feature (210)..(210): n is a, c, g, or t
  misc_feature (230)..(230): n is a, c, g, or t
  misc_feature (269)..(269): n is a, c, g, or t
  misc_feature (273)..(273): n is a, c, g, or t
  misc_feature (325)..(325): n is a, c, g, or t
  misc_feature (375)..(375): n is a, c, g, or t
  misc_feature (379)..(379): n is a, c, g, or t
  misc_feature (389)..(389): n is a, c, g, or t
  misc_feature (397)..(397): n is a, c, g, or t
  misc_feature (421)..(421): n is a, c, g, or t
  misc_feature (442)..(442): n is a, c, g, or t
  misc_feature (446)..(446): n is a, c, g, or t
  misc_feature (469)..(469): n is a, c, g, or t
  misc_feature (471)..(472): n is a, c, g, or t
  misc_feature (480)..(480): n is a, c, g, or t
  misc_feature (483)..(483): n is a, c, g, or t
  misc_feature (518)..(518): n is a, c, g, or t
  misc_feature (529)..(529): n is a, c, g, or t
  misc_feature (533)..(533): n is a, c, g, or t
  misc_feature (554)..(554): n is a, c, g, or t
  misc_feature (561)..(561): n is a, c, g, or t
  misc_feature (572)..(572): n is a, c, g, or t
  misc_feature (660)..(661): n is a, c, g, or t
  misc_feature (712)..(712): n is a, c, g, or t
  misc_feature (843)..(843): n is a, c, g, or t
gggagaaaggggcgacntttattggtccnggagnggggggncaaatgggtttttatccantttaacggggggaggccccggnngaggaattcccgggggaggaanaaaaacaagatccgcntaagagggngggggtntccgnnnttnttngaatngtggngcaccgggggggcaaggaagagggttcccggagaatggggnggataaaangattggcaactcaccccggntagttgtaccaggtgttttttttttttttttttgttcanaaanaggaaaatgattcaagttaaaaaagtaattggcaaggaaatttttttcctancctccttgaaaaatagtgggaacaggggttcccaaggggaaaggtccccnattnaacaaaatgngtttcagnggagtgtggcccacccattgtgtntccatggaagagtggcttttntggngaagttcattttccttaaccttnannactgtaanggntcttgtgcttgagaatattgttggccagctttatngtcttcatttntaanactatttagactagagtgttntagattntaggtcttcangtttccagtcaccagtccttggctttttagtatggaaatcaccagtaatggcaatataacatccctgcttctgtttcttagaaggctnnattacagtgtgttcaaactccgtgtcattgcaacaggttaaactaactttntacgtaggacatcagggtattgacattctcatcctaaagtcagtttgtctgtttccagaggaggaactgaagcagtggttctttaagtaactgactcagggctttcctgcctggcgcgcctgccaggcatngtgtagcattgtactgcatcttctttgaccagtttccccaggtgaagagcctg

SEQ ID NO: 6 - DNA, 937 bp, Artificial Sequence
  Description of Artificial Sequence: Note = Synthetic Construct
  misc_feature (16)..(16): n is a, c, g, or t
  misc_feature (18)..(18): n is a, c, g, or t
  misc_feature (27)..(27): n is a, c, g, or t
  misc_feature (49)..(49): n is a, c, g, or t
  misc_feature (67)..(67): n is a, c, g, or t
  misc_feature (76)..(76): n is a, c, g, or t
  misc_feature (79)..(79): n is a, c, g, or t
  misc_feature (82)..(83): n is a, c, g, or t
  misc_feature (88)..(88): n is a, c, g, or t
  misc_feature (90)..(90): n is a, c, g, or t
  misc_feature (94)..(94): n is a, c, g, or t
  misc_feature (98)..(98): n is a, c, g, or t
  misc_feature (102)..(102): n is a, c, g, or t
  misc_feature (112)..(113): n is a, c, g, or t
  misc_feature (121)..(121): n is a, c, g, or t
  misc_feature (133)..(134): n is a, c, g, or t
  misc_feature (139)..(140): n is a, c, g, or t
  misc_feature (171)..(171): n is a, c, g, or t
  misc_feature (177)..(177): n is a, c, g, or t
  misc_feature (197)..(197): n is a, c, g, or t
  misc_feature (199)..(199): n is a, c, g, or t
  misc_feature (220)..(220): n is a, c, g, or t
  misc_feature (235)..(235): n is a, c, g, or t
  misc_feature (240)..(240): n is a, c, g, or t
  misc_feature (269)..(269): n is a, c, g, or t
  misc_feature (286)..(286): n is a, c, g, or t
  misc_feature (303)..(303): n is a, c, g, or t
  misc_feature (358)..(358): n is a, c, g, or t
  misc_feature (393)..(393): n is a, c, g, or t
  misc_feature (447)..(447): n is a, c, g, or t
  misc_feature (481)..(481): n is a, c, g, or t
  misc_feature (599)..(599): n is a, c, g, or t
  misc_feature (694)..(694): n is a, c, g, or t
  misc_feature (735)..(735): n is a, c, g, or t
  misc_feature (865)..(865): n is a, c, g, or t
  misc_feature (885)..(885): n is a, c, g, or t
  misc_feature (917)..(917): n is a, c, g, or t
gggccccccccccccnanttaattttngggaagaaaaaagggaaaaaantttggggtcaggaaaaangaagttggnaancgnnggggngncagnattngaanagtgggggannttaatttnagaggtcccttnnttccnnggaaaagtttaaaaggggttcaattaacttnggatcnccatttatcagattacccgngngtcacctggggaccctttacnggtggcgggacattngaaanacatattagtcagattatacatagcaaanatagttaggagcacaangaatcatttatggtggnggtcaccacacaggagatgtattatccgcagtattagagagttgagaaccatatnttagagatgcggtagactgactgttcccttttcgnttggagtgaccttgccattagaggcaacagcatcagtattgttcccagtccccntcacactgattcgaactttaaggacactgatctntggctggtagaggttcagcacacataccagagttacgagtcacgtgccagaagggcaaactgaacacggaattagagggaactcgatgtctccggcttgcactggtcttctcttgcantagaatccttcatcctgctcccagtccggacgtccaggcaacaagggcgtggaaagtgagggggctgggaggtgtgtttgccttgcctcaggcgntgggtggggttggggcgtgccagcactcccctgggcgggcntcaccgatgctggccactataaggccagccagactgcgacacagtccatcccctcgaccactcttttggcgcttcattgtcgacgtgtggtgagctctcactggggcgtccctctaagatctgtccactncctggtctaggggttaagcnttttcctgccctgaaagaccccacaatgtagntttggcaagctagcaaaggt

SEQ ID NO: 7 - DNA, 888 bp, Artificial Sequence
  Description of Artificial Sequence: Note = Synthetic Construct
  misc_feature (19)..(19): n is a, c, g, or t
  misc_feature (44)..(44): n is a, c, g, or t
  misc_feature (51)..(51): n is a, c, g, or t
  misc_feature (65)..(65): n is a, c, g, or t
  misc_feature (82)..(82): n is a, c, g, or t
  misc_feature (86)..(87): n is a, c, g, or t
  misc_feature (89)..(89): n is a, c, g, or t
  misc_feature (94)..(94): n is a, c, g, or t
  misc_feature (96)..(96): n is a, c, g, or t
  misc_feature (104)..(104): n is a, c, g, or t
  misc_feature (109)..(109): n is a, c, g, or t
  misc_feature (138)..(138): n is a, c, g, or t
  misc_feature (145)..(146): n is a, c, g, or t
  misc_feature (168)..(168): n is a, c, g, or t
  misc_feature (175)..(175): n is a, c, g, or t
  misc_feature (194)..(194): n is a, c, g, or t
  misc_feature (204)..(204): n is a, c, g, or t
  misc_feature (221)..(221): n is a, c, g, or t
  misc_feature (231)..(231): n is a, c, g, or t
  misc_feature (235)..(235): n is a, c, g, or t
  misc_feature (238)..(238): n is a, c, g, or t
  misc_feature (246)..(246): n is a, c, g, or t
  misc_feature (249)..(249): n is a, c, g, or t
  misc_feature (270)..(270): n is a, c, g, or t
  misc_feature (280)..(280): n is a, c, g, or t
  misc_feature (294)..(295): n is a, c, g, or t
  misc_feature (301)..(301): n is a, c, g, or t
  misc_feature (305)..(306): n is a, c, g, or t
  misc_feature (313)..(313): n is a, c, g, or t
  misc_feature (320)..(320): n is a, c, g, or t
  misc_feature (331)..(331): n is a, c, g, or t
  misc_feature (343)..(343): n is a, c, g, or t
  misc_feature (368)..(368): n is a, c, g, or t
  misc_feature (385)..(385): n is a, c, g, or t
  misc_feature (390)..(390): n is a, c, g, or t
  misc_feature (394)..(395): n is a, c, g, or t
  misc_feature (406)..(406): n is a, c, g, or t
  misc_feature (414)..(414): n is a, c, g, or t
  misc_feature (470)..(470): n is a, c, g, or t
  misc_feature (500)..(500): n is a, c, g, or t
  misc_feature (505)..(505): n is a, c, g, or t
  misc_feature (523)..(523): n is a, c, g, or t
  misc_feature (547)..(547): n is a, c, g, or t
  misc_feature (554)..(554): n is a, c, g, or t
  misc_feature (563)..(563): n is a, c, g, or t
  misc_feature (570)..(570): n is a, c, g, or t
  misc_feature (591)..(591): n is a, c, g, or t
  misc_feature (594)..(594): n is a, c, g, or t
  misc_feature (608)..(608): n is a, c, g, or t
  misc_feature (621)..(621): n is a, c, g, or t
  misc_feature (627)..(627): n is a, c, g, or t
  misc_feature (640)..(640): n is a, c, g, or t
  misc_feature (670)..(670): n is a, c, g, or t
  misc_feature (675)..(675): n is a, c, g, or t
  misc_feature (689)..(689): n is a, c, g, or t
  misc_feature (714)..(714): n is a, c, g, or t
  misc_feature (724)..(724): n is a, c, g, or t
  misc_feature (739)..(739): n is a, c, g, or t
  misc_feature (753)..(753): n is a, c, g, or t
  misc_feature (762)..(762): n is a, c, g, or t
  misc_feature (829)..(829): n is a, c, g, or t
  misc_feature (864)..(865): n is a, c, g, or t
  misc_feature (870)..(870): n is a, c, g, or t
aaaagggggccccagcggnggggggttgtccaaggaatcaaaangtggggngggggggaaaaaantacttttaaaaaaggcngccnnanaatanangacgttcnggggngtttgaaaaaaggccggaagcctcggacnggtttcnntgttaggacaaggaaaaagggnacgcacngggatttcctttccttatnttagcaaatngccggccaggaaaccancgagttgggngggnttnggttttcngtnaaaggaaagcagggggggganaaacacgganaaaaagggaagaanngggttnattnnggttagnaattggntcccagagagngccaagaaaatnggcctgtccaaaattctttttcccngcttttaagacaggcangatantatnnggcagcaggtnattaccanaggtaagtaaattacaatgggtaagggcttggcacaggccagggtaagtagggcangtatggatgttaaacattacccttcatccngaggnagttaacacaagcattcntggcgggtctcacatatcccaaanaaaaatnttcaaaagnagccccntggggaacgttaagccaagcntangactcacaagggangacatgggcaggntagggnacagaatcagtgntcagagactccaggggcacccctgattccntttgntgtcacacagacantgctccagggacaaccttcccggangtgagtatangactttcctgatggngacgctgccgtgangggacactncctcgtggtagcacacattcctcagtcagcttctgagcctcagggtcccagcaggcacagtggcaangacctcattcttctcgtctgtcccactgaaagacnntcacnaaggagctggctagtaga

SEQ ID NO: 8 - DNA, 980 bp, Artificial Sequence
  Description of Artificial Sequence: Note = Synthetic Construct
agaaatgaaaaagaaggaaagctaaaaatagattataagtgttctatttgaaaaaagaaagaaaaaaaagaaaaagaacacagagaagaataaaggagaagaaaaaggaagagaaaaaaaagaaagaaaaaacggaaaagaaacctagaaaataaaaaaacaaagtatccgataaggaagagaaaggagaaagacttacctagagcccagaaatagagaaactagaacaaaaaatggagaagaagaggagagaaaaaggattagagagggtgaggtagaaggaagaaaagacaagaaagcagaaaaaaactaacaaagatgcatataaacagagagaagatgattaagattagagaaaaagaccaaagagagaaggtagacaggacaaataaaacaaaaacaggaggggagaaggggaaagaagaaagagggcaaaagcaaaggaataagataatagcaccaatagcaggacagtaaagggtagagaagggaccattccctaccccataggggggaacgaccccggaatcaaaatacaaggcaccgagctgaacctggttatcacacaggcaggagtggtatagcacggcgttccgggcaaaaaaaaaaatgaaaaataaattccttcgggcggagaactagaagaggatgggaactccttgacagaagtagcaggcaggaagccagccagcaccccagcccaaacagaagcagccgcaatgaaacgggcggcagatccacatccgcaaagtcctcaagggagcatcggcgaggcccggagccaatgaggaagggcaggaaaccatatcaagccgagcgtcgggacggctgccatgagacacccggagaggtaattttttttttacgggaagcgtccagccaagttagtgggccggaagcgacggtactttagtatacatcgttttgcccgagtggtcagattcttttgttatccccaacagaaccgtaagctagaaata

SEQ ID NO: 9 - DNA, 845 bp, Artificial Sequence; identical to SEQ ID NO: 2
  Description of Artificial Sequence: Note = Synthetic Construct
  misc_feature (3)..(3): n is a, c, g, or t
  misc_feature (11)..(11): n is a, c, g, or t
  misc_feature (13)..(13): n is a, c, g, or t
  misc_feature (18)..(18): n is a, c, g, or t
  misc_feature (30)..(30): n is a, c, g, or t
  misc_feature (39)..(39): n is a, c, g, or t
  misc_feature (42)..(42): n is a, c, g, or t
  misc_feature (63)..(64): n is a, c, g, or t
  misc_feature (74)..(74): n is a, c, g, or t
  misc_feature (89)..(89): n is a, c, g, or t
  misc_feature (92)..(93): n is a, c, g, or t
  misc_feature (103)..(103): n is a, c, g, or t
  misc_feature (110)..(110): n is a, c, g, or t
  misc_feature (126)..(126): n is a, c, g, or t
  misc_feature (128)..(128): n is a, c, g, or t
  misc_feature (130)..(130): n is a, c, g, or t
  misc_feature (133)..(134): n is a, c, g, or t
  misc_feature (140)..(140): n is a, c, g, or t
  misc_feature (158)..(158): n is a, c, g, or t
  misc_feature (161)..(162): n is a, c, g, or t
  misc_feature (164)..(164): n is a, c, g, or t
  misc_feature (167)..(167): n is a, c, g, or t
  misc_feature (179)..(179): n is a, c, g, or t
  misc_feature (182)..(182): n is a, c, g, or t
  misc_feature (189)..(189): n is a, c, g, or t
  misc_feature (193)..(193): n is a, c, g, or t
  misc_feature (200)..(200): n is a, c, g, or t
  misc_feature (207)..(207): n is a, c, g, or t
  misc_feature (214)..(214): n is a, c, g, or t
  misc_feature (216)..(216): n is a, c, g, or t
  misc_feature (224)..(224): n is a, c, g, or t
  misc_feature (230)..(230): n is a, c, g, or t
  misc_feature (233)..(233): n is a, c, g, or t
  misc_feature (244)..(244): n is a, c, g, or t
  misc_feature (247)..(247): n is a, c, g, or t
  misc_feature (264)..(264): n is a, c, g, or t
  misc_feature (266)..(266): n is a, c, g, or t
  misc_feature (276)..(276): n is a, c, g, or t
  misc_feature (278)..(278): n is a, c, g, or t
  misc_feature (283)..(283): n is a, c, g, or t
  misc_feature (285)..(285): n is a, c, g, or t
  misc_feature (300)..(300): n is a, c, g, or t
  misc_feature (305)..(306): n is a, c, g, or t
  misc_feature (316)..(317): n is a, c, g, or t
  misc_feature (329)..(329): n is a, c, g, or t
  misc_feature (338)..(339): n is a, c, g, or t
  misc_feature (342)..(342): n is a, c, g, or t
  misc_feature (344)..(345): n is a, c, g, or t
  misc_feature (358)..(358): n is a, c, g, or t
  misc_feature (360)..(360): n is a, c, g, or t
  misc_feature (369)..(369): n is a, c, g, or t
  misc_feature (371)..(371): n is a, c, g, or t
  misc_feature (373)..(373): n is a, c, g, or t
  misc_feature (376)..(377): n is a, c, g, or t
  misc_feature (397)..(397): n is a, c, g, or t
  misc_feature (402)..(402): n is a, c, g, or t
  misc_feature (413)..(413): n is a, c, g, or t
  misc_feature (425)..(425): n is a, c, g, or t
  misc_feature (433)..(433): n is a, c, g, or t
  misc_feature (444)..(444): n is a, c, g, or t
  misc_feature (448)..(448): n is a, c, g, or t
  misc_feature (450)..(450): n is a, c, g, or t
  misc_feature (456)..(457): n is a, c, g, or t
  misc_feature (479)..(479): n is a, c, g, or t
  misc_feature (482)..(482): n is a, c, g, or t
  misc_feature (494)..(494): n is a, c, g, or t
  misc_feature (497)..(498): n is a, c, g, or t
  misc_feature (500)..(500): n is a, c, g, or t
  misc_feature (523)..(523): n is a, c, g, or t
  misc_feature (526)..(526): n is a, c, g, or t
  misc_feature (532)..(533): n is a, c, g, or t
  misc_feature (538)..(538): n is a, c, g, or t
  misc_feature (548)..(548): n is a, c, g, or t
  misc_feature (553)..(553): n is a, c, g, or t
  misc_feature (555)..(555): n is a, c, g, or t
  misc_feature (558)..(558): n is a, c, g, or t
  misc_feature (566)..(566): n is a, c, g, or t
  misc_feature (583)..(583): n is a, c, g, or t
  misc_feature (589)..(589): n is a, c, g, or t
  misc_feature (591)..(591): n is a, c, g, or t
  misc_feature (595)..(595): n is a, c, g, or t
  misc_feature (601)..(601): n is a, c, g, or t
  misc_feature (604)..(604): n is a, c, g, or t
  misc_feature (624)..(624): n is a, c, g, or t
  misc_feature (633)..(633): n is a, c, g, or t
  misc_feature (642)..(642): n is a, c, g, or t
  misc_feature (653)..(653): n is a, c, g, or t
  misc_feature (659)..(659): n is a, c, g, or t
  misc_feature (665)..(665): n is a, c, g, or t
  misc_feature (676)..(677): n is a, c, g, or t
  misc_feature (688)..(688): n is a, c, g, or t
  misc_feature (698)..(698): n is a, c, g, or t
  misc_feature (700)..(700): n is a, c, g, or t
  misc_feature (703)..(703): n is a, c, g, or t
  misc_feature (705)..(705): n is a, c, g, or t
  misc_feature (711)..(711): n is a, c, g, or t
  misc_feature (722)..(722): n is a, c, g, or t
  misc_feature (742)..(742): n is a, c, g, or t
  misc_feature (745)..(745): n is a, c, g, or t
  misc_feature (753)..(753): n is a, c, g, or t
  misc_feature (760)..(760): n is a, c, g, or t
  misc_feature (765)..(766): n is a, c, g, or t
  misc_feature (778)..(780): n is a, c, g, or t
  misc_feature (788)..(789): n is a, c, g, or t
  misc_feature (791)..(791): n is a, c, g, or t
  misc_feature (815)..(815): n is a, c, g, or t
  misc_feature (828)..(829): n is a, c, g, or t

SEQ ID NO: 10 - DNA, 528 bp, Artificial Sequence
  Description of Artificial Sequence: Note = Synthetic Construct
  misc_feature (7)..(8): n is a, c, g, or t
  misc_feature (18)..(18): n is a, c, g, or t
  misc_feature (27)..(27): n is a, c, g, or t
  misc_feature (29)..(29): n is a, c, g, or t
  misc_feature (38)..(38): n is a, c, g, or t
  misc_feature (57)..(58): n is a, c, g, or t
  misc_feature (70)..(70): n is a, c, g, or t
  misc_feature (79)..(80): n is a, c, g, or t
  misc_feature (85)..(85): n is a, c, g, or t
  misc_feature (99)..(100): n is a, c, g, or t
  misc_feature (114)..(114): n is a, c, g, or t
  misc_feature (116)..(116): n is a, c, g, or t
  misc_feature (120)..(120): n is a, c, g, or t
  misc_feature (124)..(124): n is a, c, g, or t
  misc_feature (128)..(129): n is a, c, g, or t
  misc_feature (142)..(142): n is a, c, g, or t
  misc_feature (161)..(162): n is a, c, g, or t
  misc_feature (164)..(164): n is a, c, g, or t
  misc_feature (203)..(204): n is a, c, g, or t
  misc_feature (208)..(208): n is a, c, g, or t
  misc_feature (212)..(212): n is a, c, g, or t
  misc_feature (220)..(221): n is a, c, g, or t
  misc_feature (223)..(223): n is a, c, g, or t
  misc_feature (231)..(231): n is a, c, g, or t
  misc_feature (236)..(236): n is a, c, g, or t
  misc_feature (238)..(238): n is a, c, g, or t
  misc_feature (243)..(244): n is a, c, g, or t
  misc_feature (254)..(255): n is a, c, g, or t
  misc_feature (269)..(269): n is a, c, g, or t
  misc_feature (276)..(276): n is a, c, g, or t
  misc_feature (279)..(279): n is a, c, g, or t
  misc_feature (282)..(282): n is a, c, g, or t
  misc_feature (286)..(287): n is a, c, g, or t
  misc_feature (297)..(297): n is a, c, g, or t
  misc_feature (310)..(310): n is a, c, g, or t
  misc_feature (320)..(321): n is a, c, g, or t
  misc_feature (324)..(324): n is a, c, g, or t
  misc_feature (333)..(333): n is a, c, g, or t
  misc_feature (346)..(347): n is a, c, g, or t
  misc_feature (367)..(367): n is a, c, g, or t
  misc_feature (393)..(393): n is a, c, g, or t
  misc_feature (400)..(400): n is a, c, g, or t
  misc_feature (402)..(402): n is a, c, g, or t
  misc_feature (412)..(413): n is a, c, g, or t
  misc_feature (436)..(436): n is a, c, g, or t
  misc_feature (444)..(444): n is a, c, g, or t
  misc_feature (451)..(451): n is a, c, g, or t
  misc_feature (459)..(459): n is a, c, g, or t
  misc_feature (473)..(473): n is a, c, g, or t
  misc_feature (478)..(478): n is a, c, g, or t
  misc_feature (483)..(483): n is a, c, g, or t
  misc_feature (497)..(497): n is a, c, g, or t
  misc_feature (502)..(502): n is a, c, g, or t
  misc_feature (511)..(511): n is a, c, g, or t
  misc_feature (515)..(516): n is a, c, g, or t
  misc_feature (518)..(518): n is a, c, g, or t
ggatttnntaacctttcngggaagggngnggaaaaggngccaaacaaaaagaccccnntgcccggaaatncttgggggnnattgnggagcgttttttannggggattggggggntngggntgcncccnnatattcccggctnaggggcaacccgaggggtnntntccgaccatgtaacttgtttcggaatgagggggaatgcnnattntgantattgaanngngacccggnggggncntgttnnaattaacctnntacccggaatttcngcgagancgngangatnnctggcacttnttccgtattacgngtggcgttcnngantgcaggggntgcccttgtttgnntttctgagggtttcttatangcagattgtggggttggaaacgaganatccctnangtaatgccanntcacacgggatggagcaggaacnccctacgnatagttnaccttcantcagggtggggaancgatngaccngaggtatatgggcngaacnggacatgtngggnnanccgttcaatc

SEQ ID NO: 11 - DNA, 927 bp, Artificial Sequence
  Description of Artificial Sequence: Note = Synthetic Construct
  misc_feature (3)..(3): n is a, c, g, or t
  misc_feature (32)..(32): n is a, c, g, or t
  misc_feature (47)..(47): n is a, c, g, or t
  misc_feature (52)..(52): n is a, c, g, or t
  misc_feature (73)..(73): n is a, c, g, or t
  misc_feature (81)..(81): n is a, c, g, or t
  misc_feature (105)..(105): n is a, c, g, or t
  misc_feature (126)..(126): n is a, c, g, or t
  misc_feature (135)..(135): n is a, c, g, or t
  misc_feature (179)..(179): n is a, c, g, or t
  misc_feature (199)..(199): n is a, c, g, or t
  misc_feature (221)..(221): n is a, c, g, or t
  misc_feature (258)..(258): n is a, c, g, or t
  misc_feature (262)..(262): n is a, c, g, or t
  misc_feature (265)..(265): n is a, c, g, or t
  misc_feature (279)..(279): n is a, c, g, or t
  misc_feature (287)..(287): n is a, c, g, or t
  misc_feature (291)..(291): n is a, c, g, or t
  misc_feature (294)..(294): n is a, c, g, or t
  misc_feature (316)..(316): n is a, c, g, or t
  misc_feature (322)..(322): n is a, c, g, or t
  misc_feature (340)..(340): n is a, c, g, or t
  misc_feature (345)..(345): n is a, c, g, or t
  misc_feature (360)..(360): n is a, c, g, or t
  misc_feature (387)..(387): n is a, c, g, or t
  misc_feature (418)..(418): n is a, c, g, or t
  misc_feature (421)..(421): n is a, c, g, or t
  misc_feature (437)..(437): n is a, c, g, or t
  misc_feature (501)..(501): n is a, c, g, or t
  misc_feature (504)..(504): n is a, c, g, or t
  misc_feature (508)..(508): n is a, c, g, or t
  misc_feature (538)..(538): n is a, c, g, or t
  misc_feature (560)..(560): n is a, c, g, or t
  misc_feature (575)..(575): n is a, c, g, or t
  misc_feature (622)..(622): n is a, c, g, or t
  misc_feature (725)..(725): n is a, c, g, or t
  misc_feature (736)..(736): n is a, c, g, or t
  misc_feature (740)..(740): n is a, c, g, or t
  misc_feature (753)..(753): n is a, c, g, or t
  misc_feature (785)..(785): n is a, c, g, or t
  misc_feature (812)..(812): n is a, c, g, or t
  misc_feature (815)..(815): n is a, c, g, or t
  misc_feature (852)..(853): n is a, c, g, or t
  misc_feature (863)..(863): n is a, c, g, or t
  misc_feature (901)..(901): n is a, c, g, or t
  misc_feature (922)..(922): n is a, c, g, or t
aanacggtttaataagggggatgttcaaaacnccactccgggggaanaaaanaaaaaattagggggggagaanggattggngtatagtttcccaccacaaacctngttccattttttcgggggggnaacggaggncatgattatggggtgaaggcagcacccacccatttttcgggggnaagtcagttttttttggtanaatcaaagttccttcgaacatntcgttttatccaaggagttttggtgttaaattagcantttntgngagtttcaaagttntggttccngagnagntttgtaattggttcaccggttnttttgngccaggaaagcagacccntgttnggaggggagattccnatttttagttcccatttggtgtttccntaggtaatggagtctgcagacagtttgagtntantgagttgagtcccttntcctatcagccggggtggcattctgtccaaaggaggaatccagcagccagattagatttcagtntcntttntaacagggaagttagacacacccggccagnttgcagcctttccacccccaangagtgaaccctgccntttcagcttttacccaatttactttcgttggcttagcatgcagattntttggctccatgcccggagcagctgacatgggaggctttgaaacttccattatcatagaatggcaggcaggtcctttgcggttaaaaccaggagcctgggccnaatgagatggntcantgagcaaaggcgnttactgccaaccctgatgccttcagtttagtnttggaattcacagggtagaagttgaanacntttgactcttcaaaagttgtccctgtagcagggcagnngtggtgcatncctttaatttgggctactttgtgaaagatatccacaangaaccttggcaagtagaggangtcgt

SEQ ID NO: 12 - DNA, 911 bp, Artificial Sequence
  Description of Artificial Sequence: Note = Synthetic Construct
  misc_feature (19)..(19): n is a, c, g, or t
  misc_feature (23)..(23): n is a, c, g, or t
  misc_feature (31)..(31): n is a, c, g, or t
  misc_feature (40)..(40): n is a, c, g, or t
  misc_feature (49)..(49): n is a, c, g, or t
  misc_feature (55)..(55): n is a, c, g, or t
  misc_feature (64)..(65): n is a, c, g, or t
  misc_feature (75)..(76): n is a, c, g, or t
  misc_feature (78)..(78): n is a, c, g, or t
  misc_feature (87)..(87): n is a, c, g, or t
  misc_feature (89)..(89): n is a, c, g, or t
  misc_feature (92)..(92): n is a, c, g, or t
  misc_feature (111)..(112): n is a, c, g, or t
  misc_feature (121)..(121): n is a, c, g, or t
  misc_feature (130)..(130): n is a, c, g, or t
  misc_feature (135)..(136): n is a, c, g, or t
  misc_feature (140)..(140): n is a, c, g, or t
  misc_feature (150)..(150): n is a, c, g, or t
  misc_feature (161)..(161): n is a, c, g, or t
  misc_feature (168)..(169): n is a, c, g, or t
  misc_feature (175)..(175): n is a, c, g, or t
  misc_feature (178)..(178): n is a, c, g, or t
  misc_feature (181)..(181): n is a, c, g, or t
  misc_feature (188)..(188): n is a, c, g, or t
  misc_feature (194)..(194): n is a, c, g, or t
  misc_feature (205)..(205): n is a, c, g, or t
  misc_feature (210)..(210): n is a, c, g, or t
  misc_feature (221)..(222): n is a, c, g, or t
  misc_feature (228)..(229): n is a, c, g, or t
  misc_feature (244)..(244): n is a, c, g, or t
  misc_feature (250)..(250): n is a, c, g, or t
  misc_feature (254)..(255): n is a, c, g, or t
  misc_feature (265)..(265): n is a, c, g, or t
  misc_feature (267)..(267): n is a, c, g, or t
  misc_feature (277)..(278): n is a, c, g, or t
  misc_feature (284)..(284): n is a, c, g, or t
  misc_feature (286)..(286): n is a, c, g, or t
  misc_feature (308)..(309): n is a, c, g, or t
  misc_feature (314)..(314): n is a, c, g, or t
  misc_feature (323)..(323): n is a, c, g, or t
  misc_feature (331)..(331): n is a, c, g, or t
  misc_feature (339)..(339): n is a, c, g, or t
  misc_feature (346)..(346): n is a, c, g, or t
  misc_feature (353)..(353): n is a, c, g, or t
  misc_feature (356)..(357): n is a, c, g, or t
  misc_feature (365)..(365): n is a, c, g, or t
  misc_feature (369)..(369): n is a, c, g, or t
  misc_feature (381)..(381): n is a, c, g, or t
  misc_feature (385)..(385): n is a, c, g, or t
  misc_feature (401)..(401): n is a, c, g, or t
  misc_feature (410)..(410): n is a, c, g, or t
  misc_feature (419)..(419): n is a, c, g, or t
  misc_feature (424)..(424): n is a, c, g, or t
  misc_feature (434)..(434): n is a, c, g, or t
  misc_feature (436)..(436): n is a, c, g, or t
  misc_feature (438)..(438): n is a, c, g, or t
  misc_feature (445)..(445): n is a, c, g, or t
  misc_feature (449)..(449): n is a, c, g, or t
  misc_feature (452)..(452): n is a, c, g, or t
  misc_feature (458)..(458): n is a, c, g, or t
  misc_feature (461)..(463): n is a, c, g, or t
  misc_feature (465)..(467): n is a, c, g, or t
  misc_feature (476)..(476): n is a, c, g, or t
  misc_feature (483)..(484): n is a, c, g, or t
  misc_feature (487)..(487): n is a, c, g, or t
  misc_feature (491)..(491): n is a, c, g, or t
  misc_feature (493)..(493): n is a, c, g, or t
  misc_feature (496)..(496): n is a, c, g, or t
  misc_feature (524)..(524): n is a, c, g, or t
  misc_feature (533)..(533): n is a, c, g, or t
  misc_feature (538)..(538): n is a, c, g, or t
  misc_feature (545)..(545): n is a, c, g, or t
  misc_feature (548)..(548): n is a, c, g, or t
  misc_feature (558)..(558): n is a, c, g, or t
  misc_feature (561)..(561): n is a, c, g, or t
  misc_feature (568)..(568): n is a, c, g, or t
  misc_feature (570)..(570): n is a, c, g, or t
  misc_feature (572)..(572): n is a, c, g, or t
  misc_feature (574)..(574): n is a, c, g, or t
  misc_feature (580)..(580): n is a, c, g, or t
  misc_feature (582)..(582): n is a, c, g, or t
  misc_feature (586)..(586): n is a, c, g, or t
  misc_feature (595)..(595): n is a, c, g, or t
  misc_feature (600)..(600): n is a, c, g, or t
  misc_feature (602)..(602): n is a, c, g, or t
  misc_feature (606)..(606): n is a, c, g, or t
  misc_feature (608)..(609): n is a, c, g, or t
  misc_feature (625)..(625): n is a, c, g, or t
  misc_feature (639)..(639): n is a, c, g, or t
  misc_feature (645)..(645): n is a, c, g, or t
  misc_feature (657)..(657): n is a, c, g, or t
  misc_feature (660)..(660): n is a, c, g, or t
  misc_feature (679)..(679): n is a, c, g, or t
  misc_feature (684)..(684): n is a, c, g, or t
  misc_feature (691)..(691): n is a, c, g, or t
  misc_feature (694)..(695): n is a, c, g, or t
  misc_feature (698)..(698): n is a, c, g, or t
  misc_feature (701)..(702): n is a, c, g, or t
  misc_feature (704)..(704): n is a, c, g, or t
  misc_feature (714)..(714): n is a, c, g, or t
  misc_feature (723)..(723): n is a, c, g, or t
  misc_feature (726)..(726): n is a, c, g, or t
  misc_feature (728)..(728): n is a, c, g, or t
  misc_feature (730)..(731): n is a, c, g, or t
  misc_feature (746)..(746): n is a, c, g, or t
  misc_feature (751)..(751): n is a, c, g, or t
  misc_feature (754)..(754): n is a, c, g, or t
  misc_feature (766)..(767): n is a, c, g, or t
  misc_feature (769)..(769): n is a, c, g, or t
  misc_feature (774)..(774): n is a, c, g, or t
  misc_feature (792)..(792): n is a, c, g, or t
  misc_feature (818)..(818): n is a, c, g, or t
  misc_feature (825)..(825): n is a, c, g, or t
  misc_feature (829)..(829): n is a, c, g, or t
  misc_feature (839)..(839): n is a, c, g, or t
  misc_feature (851)..(851): n is a, c, g, or t
  misc_feature (854)..(854): n is a, c, g, or t
  misc_feature (865)..(865): n is a, c, g, or t
  misc_feature (873)..(873): n is a, c, g, or t
  misc_feature (876)..(879): n is a, c, g, or t
  misc_feature (897)..(897): n is a, c, g, or t
  misc_feature (900)..(900): n is a, c, g, or t
gggagtttgctctcagagngccnattacgcnacagggggngtctcacantataanctcatatannatactctacnntnccccccctnangtntcaagggcaagagaatatnntctctctcntatcgtctnggggnntctnaaatgtttgngctccccgggnaaaatanntctctntcncgnctctatnttctcncctcacatatntgcgnactctttctcnnccacannaaaagcgcccagtgngggganctcnnagagtgtatngngaagaactgnnagtgtntntggggcgcgttctcggggagannatacncttctctcntctctctntagagtgngatgtanaaaaccncanntgttgcanaganaaatggggctcngagnctcttatatttccccncccctctcnccatatatnacctncgggggcttntntntaaatcncctntcnccattnttnnnannngcgtgtttntattgtnngtntccncntgntccaaaaatctcaaatttgtgtctcttntcccaaacnctatntctcccntanccctgggggngtntattatntntntntatatncntatnttatatacntatantntatntnntatatatttggggtcnttaccaaaaccccntttttntctcacttttcntcnactcccttcccggggcctngaaantttattnccnnccnttnngntccttttctnttaaattcnttncntnnggaaaacccttttcnaaacnggntttccccttttnncntcccnctcaaaccccccaaattngggcattttttcttttcccctcaccnaaccccntttncctccccccnccccccccaaantgngaataccctgnttttcagnggnnnngaaaaatccctccccganggngcccccctcct

SEQ ID NO: 13 - DNA, 880 bp, Artificial Sequence
  Description of Artificial Sequence: Note = Synthetic Construct
  misc_feature (13)..(13): n is a, c, g, or t
  misc_feature (28)..(28): n is a, c, g, or t
  misc_feature (33)..(33): n is a, c, g, or t
  misc_feature (41)..(41): n is a, c, g, or t
  misc_feature (46)..(46): n is a, c, g, or t
  misc_feature (51)..(51): n is a, c, g, or t
  misc_feature (55)..(55): n is a, c, g, or t
  misc_feature (58)..(58): n is a, c, g, or t
  misc_feature (64)..(64): n is a, c, g, or t
  misc_feature (69)..(69): n is a, c, g, or t
  misc_feature (77)..(77): n is a, c, g, or t
  misc_feature (87)..(87): n is a, c, g, or t
  misc_feature (99)..(99): n is a, c, g, or t
  misc_feature (105)..(105): n is a, c, g, or t
  misc_feature (111)..(111): n is a, c, g, or t
  misc_feature (117)..(117): n is a, c, g, or t
  misc_feature (120)..(120): n is a, c, g, or t
  misc_feature (130)..(130): n is a, c, g, or t
  misc_feature (141)..(142): n is a, c, g, or t
  misc_feature (145)..(145): n is a, c, g, or t
  misc_feature (147)..(147): n is a, c, g, or t
  misc_feature (153)..(153): n is a, c, g, or t
  misc_feature (185)..(185): n is a, c, g, or t
  misc_feature (213)..(213): n is a, c, g, or t
  misc_feature (217)..(217): n is a, c, g, or t
  misc_feature (223)..(223): n is a, c, g, or t
  misc_feature (225)..(225): n is a, c, g, or t
  misc_feature (234)..(234): n is a, c, g, or t
  misc_feature (237)..(237): n is a, c, g, or t
  misc_feature (239)..(240): n is a, c, g, or t
  misc_feature (256)..(256): n is a, c, g, or t
  misc_feature (263)..(263): n is a, c, g, or t
  misc_feature (272)..(272): n is a, c, g, or t
  misc_feature (274)..(274): n is a, c, g, or t
  misc_feature (292)..(293): n is a, c, g, or t
  misc_feature (304)..(304): n is a, c, g, or t
  misc_feature (306)..(306): n is a, c, g, or t
  misc_feature (310)..(310): n is a, c, g, or t
  misc_feature (335)..(335): n is a, c, g, or t
  misc_feature (339)..(339): n is a, c, g, or t
  misc_feature (361)..(361): n is a, c, g, or t
  misc_feature (368)..(368): n is a, c, g, or t
  misc_feature (375)..(377): n is a, c, g, or t
  misc_feature (384)..(385): n is a, c, g, or t
  misc_feature (402)..(402): n is a, c, g, or t
  misc_feature (407)..(407): n is a, c, g, or t
  misc_feature (416)..(417): n is a, c, g, or t
  misc_feature (422)..(422): n is a, c, g, or t
  misc_feature (432)..(432): n is a, c, g, or t
  misc_feature (442)..(442): n is a, c, g, or t
  misc_feature (460)..(461): n is a, c, g, or t
  misc_feature (478)..(478): n is a, c, g, or t
  misc_feature (482)..(482): n is a, c, g, or t
  misc_feature (490)..(490): n is a, c, g, or t
  misc_feature (492)..(492): n is a, c, g, or t
  misc_feature (508)..(508): n is a, c, g, or t
  misc_feature (518)..(518): n is a, c, g, or t
  misc_feature (550)..(550): n is a, c, g, or t
  misc_feature (557)..(557): n is a, c, g, or t
  misc_feature (560)..(560): n is a, c, g, or t
  misc_feature (563)..(563): n is a, c, g, or t
  misc_feature (581)..(581): n is a, c, g, or t
  misc_feature (586)..(586): n is a, c, g, or t
  misc_feature (657)..(657): n is a, c, g, or t
  misc_feature (662)..(662): n is a, c, g, or t
  misc_feature (710)..(711): n is a, c, g, or t
  misc_feature (713)..(713): n is a, c, g, or t
  misc_feature (722)..(722): n is a, c, g, or t
  misc_feature (724)..(725): n is a, c, g, or t
  misc_feature (735)..(735): n is a, c, g, or t
  misc_feature (739)..(739): n is a, c, g, or t
  misc_feature (742)..(742): n is a, c, g, or t
  misc_feature (778)..(778): n is a, c, g, or t
  misc_feature (783)..(783): n is a, c, g, or t
  misc_feature (789)..(789): n is a, c, g, or t
  misc_feature (799)..(799): n is a, c, g, or t
  misc_feature (806)..(806): n is a, c, g, or t
  misc_feature (814)..(814): n is a, c, g, or t
  misc_feature (835)..(835): n is a, c, g, or t
  misc_feature (837)..(837): n is a, c, g, or t
  misc_feature (867)..(867): n is a, c, g, or t
  misc_feature (869)..(869): n is a, c, g, or t
gggcaccaacggnggaagagttttccanggtanaagaaagnaggantgggncganaanaattanttttnaaaaaggncaccagatanaaaaaacttttnaggggngttaanaaaaangcngaaaccctcngacggttttcnngantnttaaanagattcaggggaagcacgagattatcttttcntttttgagcaaattgccagcagggaacngacnagaggntnggtttttgnatncnnttaaacgtaacgcagntttgganaaacacagntnacatggaaagacctgggnnattagggtaangnaagnggttcaagagagagccgatgaaatngccnggtccaaaatctttttccttgnctttaanacaggtnnnaaaaatnnggctgctgtttataacnatagntaagtgaannacaangggtaagtgnttggcacagnccagggtaagtaggcatnnaaggaatgttaaacatnaccnttgatcgngnggttgtttacaccgcnttaaagaaangtttaaaaatatccctgggctgtttcttcctnggtgccncanggngaacgacaagccaagcgnatgantcacaggagacgacatgggcaggttgggtacagaatcagtgttcagagactccaggggcacccagattccntcagnctgtcacacagacactgctcccagggacaaccctccgggatgtgaggnnangacttccgngnnggagacgctncagngangggacactcctggtggtagcacacattcttcagtcngattntgagcntctggtcccngcagagnacagtggnaatgacttttttcttacttgngnctccaagggcgtctccacaagacagcgtgncnagtagataagt

SEQ ID NO: 14 - DNA, 923 bp, Artificial Sequence
  Description of Artificial Sequence: Note = Synthetic Construct
  misc_feature (12)..(12): n is a, c, g, or t
  misc_feature (16)..(16): n is a, c, g, or t
  misc_feature (30)..(30): n is a, c, g, or t
  misc_feature (32)..(32): n is a, c, g, or t
  misc_feature (34)..(34): n is a, c, g, or t
  misc_feature (42)..(42): n is a, c, g, or t
  misc_feature (46)..(46): n is a, c, g, or t
  misc_feature (50)..(50): n is a, c, g, or t
  misc_feature (52)..(52): n is a, c, g, or t
  misc_feature (63)..(63): n is a, c, g, or t
  misc_feature (71)..(72): n is a, c, g, or t
  misc_feature (93)..(93): n is a, c, g, or t
  misc_feature (96)..(97): n is a, c, g, or t
  misc_feature (101)..(101): n is a, c, g, or t
  misc_feature (103)..(104): n is a, c, g, or t
  misc_feature (106)..(106): n is a, c, g, or t
  misc_feature (108)..(108): n is a, c, g, or t
  misc_feature (110)..(110): n is a, c, g, or t
  misc_feature (124)..(125): n is a, c, g, or t
  misc_feature (128)..(128): n is a, c, g, or t
  misc_feature (131)..(131): n is a, c, g, or t
  misc_feature (137)..(137): n is a, c, g, or t
  misc_feature (153)..(154): n is a, c, g, or t
  misc_feature (161)..(161): n is a, c, g, or t
  misc_feature (163)..(163): n is a, c, g, or t
  misc_feature (167)..(169): n is a, c, g, or t
  misc_feature (179)..(180): n is a, c, g, or t
  misc_feature (183)..(184): n is a, c, g, or t
  misc_feature (188)..(188): n is a, c, g, or t
  misc_feature (193)..(193): n is a, c, g, or t
  misc_feature (211)..(211): n is a, c, g, or t
  misc_feature (215)..(215): n is a, c, g, or t
  misc_feature (220)..(220): n is a, c, g, or t
  misc_feature (226)..(226): n is a, c, g, or t
  misc_feature (228)..(228): n is a, c, g, or t
  misc_feature (231)..(231): n is a, c, g, or t
  misc_feature (235)..(235): n is a, c, g, or t
  misc_feature (239)..(239): n is a, c, g, or t
  misc_feature (244)..(244): n is a, c, g, or t
  misc_feature (248)..(248): n is a, c, g, or t
  misc_feature (250)..(250): n is a, c, g, or t
  misc_feature (254)..(254): n is a, c, g, or t
  misc_feature (258)..(258): n is a, c, g, or t
  misc_feature (268)..(268): n is a, c, g, or t
  misc_feature (273)..(276): n is a, c, g, or t
  misc_feature (283)..(283): n is a, c, g, or t
  misc_feature (286)..(286): n is a, c, g, or t
  misc_feature (290)..(291): n is a, c, g, or t
  misc_feature (301)..(301): n is a, c, g, or t
  misc_feature (305)..(307): n is a, c, g, or t
  misc_feature (314)..(314): n is a, c, g, or t
  misc_feature (324)..(324): n is a, c, g, or t
  misc_feature (326)..(327): n is a, c, g, or t
  misc_feature (333)..(333): n is a, c, g, or t
  misc_feature (338)..(338): n is a, c, g, or t
  misc_feature (342)..(343): n is a, c, g, or t
  misc_feature (354)..(355): n is a, c, g, or t
  misc_feature (358)..(358): n is a, c, g, or t
  misc_feature (375)..(375): n is a, c, g, or t
  misc_feature (378)..(378): n is a, c, g, or t
  misc_feature (386)..(386): n is a, c, g, or t
  misc_feature (395)..(395): n is a, c, g, or t
  misc_feature (400)..(400): n is a, c, g, or t
  misc_feature (411)..(411): n is a, c, g, or t
  misc_feature (413)..(413): n is a, c, g, or t
  misc_feature (415)..(415): n is a, c, g, or t
  misc_feature (423)..(424): n is a, c, g, or t
  misc_feature (427)..(427): n is a, c, g, or t
  misc_feature (429)..(430): n is a, c, g, or t
  misc_feature (433)..(434): n is a, c, g, or t
  misc_feature (440)..(440): n is a, c, g, or t
  misc_feature (445)..(445): n is a, c, g, or t
  misc_feature (449)..(449): n is a, c, g, or t
  misc_feature (451)..(451): n is a, c, g, or t
  misc_feature (460)..(460): n is a, c, g, or t
  misc_feature (467)..(468): n is a, c, g, or t
  misc_feature (471)..(471): n is a, c, g, or t
  misc_feature (477)..(477): n is a, c, g, or t
  misc_feature (483)..(484): n is a, c, g, or t
  misc_feature (506)..(506): n is a, c, g, or t
  misc_feature (508)..(508): n is a, c, g, or t
  misc_feature (511)..(511): n is a, c, g, or t
  misc_feature (522)..(522): n is a, c, g, or t
  misc_feature (531)..(532): n is a, c, g, or t
  misc_feature (545)..(545): n is a, c, g, or t
  misc_feature (551)..(552): n is a, c, g, or t
  misc_feature (557)..(558): n is a, c, g, or t
  misc_feature (568)..(568): n is a, c, g, or t
  misc_feature (574)..(574): n is a, c, g, or t
  misc_feature (583)..(583): n is a, c, g, or t
  misc_feature (586)..(586): n is a, c, g, or t
  misc_feature (589)..(589): n is a, c, g, or t
  misc_feature (595)..(595): n is a, c, g, or t
  misc_feature (605)..(605): n is a, c, g, or t
  misc_feature (616)..(616): n is a, c, g, or t
  misc_feature (618)..(618): n is a, c, g, or t
  misc_feature (623)..(623): n is a, c, g, or t
  misc_feature (626)..(626): n is a, c, g, or t
  misc_feature (631)..(631): n is a, c, g, or t
  misc_feature (633)..(633): n is a, c, g, or t
  misc_feature (649)..(649): n is a, c, g, or t
  misc_feature (658)..(658): n is a, c, g, or t
  misc_feature (662)..(662): n is a, c, g, or t
  misc_feature (664)..(664): n is a, c, g, or t
  misc_feature (682)..(682): n is a, c, g, or t
  misc_feature (686)..(686): n is a, c, g, or t
  misc_feature (705)..(705): n is a, c, g, or t
  misc_feature (709)..(710): n is a, c, g, or t
  misc_feature (713)..(713): n is a, c, g, or t
  misc_feature (721)..(721): n is a, c, g, or t
  misc_feature (726)..(726): n is a, c, g, or t
  misc_feature (733)..(734): n is a, c, g, or t
  misc_feature (736)..(737): n is a, c, g, or t
  misc_feature (749)..(749): n is a, c, g, or t
  misc_feature (755)..(755): n is a, c, g, or t
  misc_feature (764)..(764): n is a, c, g, or t
  misc_feature (767)..(768): n is a, c, g, or t
  misc_feature (775)..(775): n is a, c, g, or t
  misc_feature (780)..(780): n is a, c, g, or t
  misc_feature (785)..(786): n is a, c, g, or t
  misc_feature (800)..(800): n is a, c, g, or t
  misc_feature (805)..(805): n is a, c, g, or t
  misc_feature (807)..(807): n is a, c, g, or t
  misc_feature (828)..(828): n is a, c, g, or t
  misc_feature (831)..(831): n is a, c, g, or t
  misc_feature (833)..(833): n is a, c, g, or t
  misc_feature (837)..(837): n is a, c, g, or t
  misc_feature (844)..(844): n is a, c, g, or t
  misc_feature (855)..(855): n is a, c, g, or t
  misc_feature (857)..(857): n is a, c, g, or t
  misc_feature (864)..(864): n is a, c, g, or t
  misc_feature (869)..(869): n is a, c, g, or t
  misc_feature (887)..(887): n is a, c, g, or t
  misc_feature (906)..(906): n is a, c, g, or t
  misc_feature (908)..(908): n is a, c, g, or t
gggaggagtacnggangggtccgacgtaantntntcacaggnaagncganangaggaggggtngcgtaggnnacaaagagataggaacggggncgnnaacntnncntntngaaaaggccgccanngtnaancaactntggcgggggtgggacnnaaggcgngnggcnnnagaaggtttnnttnnttgnaaccnagattcgagggacggacnggantatcntatccntnttngttncgantgccngcgngnatcnggcnagggagggtnggttnnnnggtttcnggngacnnccccagtttntggnnnatacccngctctcacangnnggacgngggtntttnnggtgaggaagnngcntccccgcgagagcccgnggnaagggcgngtccaaaantcttnttccctgcttntncnacaggctnnganannatnnggctgntgttnatcncnataggtagntcaaccnncanggggangtgctnncacaccccaggttagtgtcccntncanggtatgttaanacgttaccnntgatcgggggttntttacnnaaaannaaaaaaaaantcaccntcccgggcntgntgnttcctnggggccccanggtgaacgacnanccaanctnttgantnacaagggacgacgtgngcaggttgncgtncngagtcagtgttcagaganttcnggggcacccctgattcccncggnngtnacacaganactgntccaggnncnnccctccggttgngagtcnaagacttcnggnnggtgacnctacngtgannggacacttcgtggnggtgncncacattcgtcggtcggcttangancntctnggtcccngcagagcactntngcaatgnctttntttgttctggggcttccnaatgggtcctcccaaaagncngctttagctgtaata

SEQ ID NO: 15 - DNA, 880 bp, Artificial Sequence
  Description of Artificial Sequence: Note = Synthetic Construct
  misc_feature (2)..(2): n is a, c, g, or t
  misc_feature (4)..(4): n is a, c, g, or t
  misc_feature (12)..(12): n is a, c, g, or t
  misc_feature (16)..(16): n is a, c, g, or t
  misc_feature (18)..(18): n is a, c, g, or t
  misc_feature (31)..(31): n is a, c, g, or t
  misc_feature (39)..(39): n is a, c, g, or t
  misc_feature (46)..(46): n is a, c, g, or t
  misc_feature (52)..(52): n is a, c, g, or t
  misc_feature (54)..(54): n is a, c, g, or t
  misc_feature (58)..(58): n is a, c, g, or t
  misc_feature (62)..(63): n is a, c, g, or t
  misc_feature (88)..(88): n is a, c, g, or t
  misc_feature (120)..(121): n is a, c, g, or t
  misc_feature (131)..(131): n is a, c, g, or t
  misc_feature (136)..(136): n is a, c, g, or t
  misc_feature (145)..(145): n is a, c, g, or t
  misc_feature (153)..(153): n is a, c, g, or t
  misc_feature (158)..(158): n is a, c, g, or t
  misc_feature (162)..(162): n is a, c, g, or t
  misc_feature (169)..(169): n is a, c, g, or t
  misc_feature (178)..(178): n is a, c, g, or t
  misc_feature (181)..(181): n is a, c, g, or t
  misc_feature (184)..(184): n is a, c, g, or t
  misc_feature (199)..(200): n is a, c, g, or t
  misc_feature (202)..(202): n is a, c, g, or t
  misc_feature (208)..(208): n is a, c, g, or t
  misc_feature (221)..(221): n is a, c, g, or t
  misc_feature (226)..(226): n is a, c, g, or t
  misc_feature (235)..(235): n is a, c, g, or t
  misc_feature (249)..(251): n is a, c, g, or t
  misc_feature (264)..(264): n is a, c, g, or t
  misc_feature (273)..(273): n is a, c, g, or t
  misc_feature (276)..(277): n is a, c, g, or t
  misc_feature (282)..(282): n is a, c, g, or t
  misc_feature (287)..(288): n is a, c, g, or t
  misc_feature (290)..(290): n is a, c, g, or t
  misc_feature (304)..(304): n is a, c, g, or t
  misc_feature (310)..(310): n is a, c, g, or t
  misc_feature (314)..(314): n is a, c, g, or t
  misc_feature (316)..(316): n is a, c, g, or t
  misc_feature (321)..(323): n is a, c, g, or t
  misc_feature (325)..(325): n is a, c, g, or t
  misc_feature (328)..(328): n is a, c, g, or t
  misc_feature (347)..(347): n is a, c, g, or t
  misc_feature (364)..(364): n is a, c, g, or t
  misc_feature (372)..(372): n is a, c, g, or t
  misc_feature (375)..(376): n is a, c, g, or t
  misc_feature (378)..(378): n is a, c, g, or t
  misc_feature (384)..(384): n is a, c, g, or t
  misc_feature (386)..(386): n is a, c, g, or t
  misc_feature (398)..(398): n is a, c, g, or t
  misc_feature (407)..(407): n is a, c, g, or t
  misc_feature (411)..(411): n is a, c, g, or t
  misc_feature (423)..(423): n is a, c, g, or t
  misc_feature (440)..(440): n is a, c, g, or t
  misc_feature (463)..(463): n is a, c, g, or t
  misc_feature (465)..(465): n is a, c, g, or t
  misc_feature (471)..(471): n is a, c, g, or t
  misc_feature (489)..(489): n is a, c, g, or t
  misc_feature (493)..(493): n is a, c, g, or t
  misc_feature (510)..(510): n is a, c, g, or t
  misc_feature (520)..(520): n is a, c, g, or t
  misc_feature (544)..(544): n is a, c, g, or t
  misc_feature (549)..(550): n is a, c, g, or t
  misc_feature (560)..(560): n is a, c, g, or t
  misc_feature (562)..(562): n is a, c, g, or t
  misc_feature (567)..(567): n is a, c, g, or t
  misc_feature (570)..(570): n is a, c, g, or t
  misc_feature (578)..(578): n is a, c, g, or t
  misc_feature (594)..(594): n is a, c, g, or t
  misc_feature (605)..(605): n is a, c, g, or t
  misc_feature (612)..(612): n is a, c, g, or t
  misc_feature (614)..(614): n is a, c, g, or t
  misc_feature (631)..(631): n is a, c, g, or t
  misc_feature (655)..(655): n is a, c, g, or t
  misc_feature (668)..(668): n is a, c, g, or t
  misc_feature (670)..(670): n is a, c, g, or t
  misc_feature (674)..(674): n is a, c, g, or t
  misc_feature (677)..(677): n is a, c, g, or t
  misc_feature (691)..(691): n is a, c, g, or t
  misc_feature (702)..(702): n is a, c, g, or t
  misc_feature (720)..(720): n is a, c, g, or t
  misc_feature (722)..(722): n is a, c, g, or t
  misc_feature (734)..(734): n is a, c, g, or t
  misc_feature (755)..(755): n is a, c, g, or t
  misc_feature (764)..(764): n is a, c, g, or t
  misc_feature (814)..(815): n is a, c, g, or t
  misc_feature (825)..(825): n is a, c, g, or t
  misc_feature (833)..(833): n is a, c, g, or t
  misc_feature (837)..(837): n is a, c, g, or t
  misc_feature (852)..(853): n is a, c, g, or t
  misc_feature (856)..(856): n is a, c, g, or t
  misc_feature (860)..(860): n is a, c, g, or t
  misc_feature (866)..(866): n is a, c, g, or t
ananagagtaantaananaagaggaagaganaagaaagnagaaggnaaggananaaangggnnggcgaggaaaaaaggaaaggagaanaataaaagaaaaagtgaggaaggaaggagtannagaaaaaagnaaagnggagatagnagaaaggnccggngganaaaagantagattaanganagntgaaagaataaagannanggcganaaggaaagaagancgagnattagaaanaagagaggaaagannnggggggagggaangaggcgaantcnngagancagtnnanaaggcaagagaatnaggagnaganangaagnnnangangaaggaggggaaagagggnacagaaaaaacaagtanagtaaccnacnncngcgagngngccaaataggtngcgccagcnacanggcccgagcccngggcgagggggcatcangagccaaggggagcgggtccagncntagttntgaaaggaaaggggaggngggnagatattatatggtcgngccccccccngtgtctcggtgaaaaaaaaaaggngtgannagcagggccntnttggntgngggatcgngcatgatcagagaccngaggccggacnttccgcngngccttccgtaggcccantgtcaaatgtattcaagccggttngaaggatgccggngntagngantgatgcgggggccngcccccccggntttccgcccccgcagccncngtggccgccatnacggagttcccagtggtgagngtgcggagntgaggccccgcgggtcgccgccggtccccgcagacaggaacgcggagcgnnccctgcgctngaacgtangggnccacttgaaagactnnacnaaangacgcngatttgtagaaaag

SEQ ID NO: 16 - DNA, 166 bp, Artificial Sequence
  Description of Artificial Sequence: Note = Synthetic Construct
  misc_feature (17)..(17): n is a, c, g, or t
  misc_feature (69)..(69): n is a, c, g, or t
  misc_feature (72)..(72): n is a, c, g, or t
  misc_feature (122)..(122): n is a, c, g, or t
  misc_feature (125)..(125): n is a, c, g, or t
  misc_feature (138)..(139): n is a, c, g, or t
  misc_feature (146)..(146): n is a, c, g, or t
  misc_feature (150)..(151): n is a, c, g, or t
  misc_feature (155)..(155): n is a, c, g, or t
  misc_feature (160)..(160): n is a, c, g, or t
  misc_feature (165)..(165): n is a, c, g, or t
attcttcagcttttgcntagaggaaaaagaatggattgtttctaggacaacctgctgaggtgctcaccnagngttctctctctctctctctctctctctctctctctctctctctctctctntgnctctctcctgaanntccccanaggnncttngcagnaaaang

SEQ ID NO: 17 - DNA, 162 bp, Artificial Sequence
  Description of Artificial Sequence: Note = Synthetic Construct
  misc_feature (2)..(2): n is a, c, g, or t
  misc_feature (7)..(7): n is a, c, g, or t
  misc_feature (12)..(12): n is a, c, g, or t
  misc_feature (16)..(17): n is a, c, g, or t
  misc_feature (21)..(21): n is a, c, g, or t
  misc_feature (28)..(29): n is a, c, g, or t
  misc_feature (42)..(42): n is a, c, g, or t
  misc_feature (45)..(45): n is a, c, g, or t
  misc_feature (95)..(95): n is a, c, g, or t
  misc_feature (98)..(98): n is a, c, g, or t
  misc_feature (150)..(150): n is a, c, g, or t
cnttttnctgcnaagnncctntggggannttcaggagagagncanagagagagagagagagagagagagagagagagagagagagagagagaacnctnggtgagcacctcagcaggttgtcctagaaacaatccattctttttcctctangcaaaagctgaa

SEQ ID NO: 18 - DNA, 871 bp, Artificial Sequence
  Description of Artificial Sequence: Note = Synthetic Construct
  misc_feature (48)..(48): n is a, c, g, or t
  misc_feature (53)..(53): n is a, c, g, or t
  misc_feature (115)..(115): n is a, c, g, or t
  misc_feature (119)..(119): n is a, c, g, or t
  misc_feature (121)..(121): n is a, c, g, or t
  misc_feature (139)..(139): n is a, c, g, or t
  misc_feature (141)..(141): n is a, c, g, or t
  misc_feature (145)..(145): n is a, c, g, or t
  misc_feature (183)..(183): n is a, c, g, or t
  misc_feature (204)..(204): n is a, c, g, or t
  misc_feature (211)..(211): n is a, c, g, or t
  misc_feature (335)..(335): n is a, c, g, or t
  misc_feature (428)..(428): n is a, c, g, or t
  misc_feature (533)..(533): n is a, c, g, or t
  misc_feature (574)..(574): n is a, c, g, or t
  misc_feature (578)..(578): n is a, c, g, or t
  misc_feature (600)..(600): n is a, c, g, or t
  misc_feature (749)..(749): n is a, c, g, or t
gaataaaaccccagaaaggttttaaaacattccgtatagaagttgatnaattnaaataattggaggtgaaatacacagagggtttttcaattaatcaataaaaaaataaattacntacntnttttggggggttttatgnanaaangaattggagggatcaatttgcaagaaatttattttttngtattatttaaaaaccgttanggattcngttgattttaaatcaagcagtaaatatattaaaaggtaggagaatggtatcaataggccaagataacagagtgtaaaagttaaaagtattggacagaaatattaagagttattgttaagatccnggactttggaaaatttaaaaccaagcgatttaggccaagttatttccacagtatggtatcagaaggagtaaagagacagcacaggtgcagatntgacggcttggttccttaggttattgccacagcaacggtcttggccgcaaggcaggcttgggcccagcatgagaagagagggggaaccaagttcttcagggaccngacgggcggcgccggtgagaaaggacttcatcttgccatgntcantcagcgaaactgcaaacgcttntggcagagacaacgccagatctgcagaggcattccggcctttaaccgctttcccacagtcggcccacaggccttaccgcagcagaaagcgcgcgacccggaggtcccgccagtcaaaagaaaaaggggggcgcaaaaccatataaggcntggagcaggcggcccggccccgcccccaggacatgggcccggccccaatcatgccccgcccccaggattcggtcccgcctcctcccgctcccgggatgggccgttatgctcccgatacgcat

SEQ ID NO: 19 - DNA, 936 bp, Artificial Sequence
  Description of Artificial Sequence: Note = Synthetic Construct
  misc_feature (24)..(24): n is a, c, g, or t
  misc_feature (30)..(30): n is a, c, g, or t
  misc_feature (40)..(40): n is a, c, g, or t
  misc_feature (52)..(52): n is a, c, g, or t
  misc_feature (64)..(65): n is a, c, g, or t
  misc_feature (67)..(67): n is a, c, g, or t
  misc_feature (82)..(82): n is a, c, g, or t
  misc_feature (84)..(84): n is a, c, g, or t
  misc_feature (94)..(94): n is a, c, g, or t
  misc_feature (99)..(99): n is a, c, g, or t
  misc_feature (117)..(117): n is a, c, g, or t
  misc_feature (124)..(124): n is a, c, g, or t
  misc_feature (130)..(130): n is a, c, g, or t
  misc_feature (152)..(152): n is a, c, g, or t
  misc_feature (157)..(157): n is a, c, g, or t
  misc_feature (164)..(164): n is a, c, g, or t
  misc_feature (176)..(176): n is a, c, g, or t
  misc_feature (193)..(193): n is a, c, g, or t
  misc_feature (209)..(209): n is a, c, g, or t
  misc_feature (215)..(215): n is a, c, g, or t
  misc_feature (225)..(225): n is a, c, g, or t
  misc_feature (227)..(227): n is a, c, g, or t
  misc_feature (231)..(231): n is a, c, g, or t
  misc_feature (239)..(239): n is a, c, g, or t
  misc_feature (247)..(247): n is a, c, g, or t
  misc_feature (252)..(252): n is a, c, g, or t
  misc_feature (273)..(273): n is a, c, g, or t
  misc_feature (277)..(277): n is a, c, g, or t
  misc_feature (304)..(304): n is a, c, g, or t
  misc_feature (315)..(315): n is a, c, g, or t
  misc_feature (335)..(335): n is a, c, g, or t
  misc_feature (355)..(355): n is a, c, g, or t
  misc_feature (383)..(383): n is a, c, g, or t
  misc_feature (405)..(405): n is a, c, g, or t
  misc_feature (444)..(444): n is a, c, g, or t
  misc_feature (520)..(520): n is a, c, g, or t
  misc_feature (545)..(545): n is a, c, g, or t
  misc_feature (559)..(559): n is a, c, g, or t
  misc_feature (868)..(868): n is a, c, g, or t
  misc_feature (906)..(906): n is a, c, g, or t
  misc_feature (913)..(914): n is a, c, g, or t
  misc_feature (916)..(916): n is a, c, g, or t
tgggattcaaaaattggaagttantttttnaggaaatttntttttaaaattntaattggggggnntngccaccaattaaaangngtttgaattnaaaangattgccgggggaaaaanccatttnctgcanggaattaaccaagtaatttggnttggnagcactngttttgggcctntaaaaggcattttaaanacaaattaacagggcnggcatnttcaacgggngntagnttgttttnatgaaacngaggnttttgggggcgggcctttccnattngtttccttttttaggattaacagatgngaaaaaaaatnatggttttatatcatcgttnttggcatcagcagattggcnattcaattaaaacagatcattcatgatnggctttttggccattaccatgnaaacacaaagagccagggtttgattgccctgacccgccnaccttcggttgcttaggtgaggtgcagcactgcgtttttccttttcggactgaaaacaggcgaatgaatcatttcngtcgtgtcttgagggtgcatttttnacatttttgtgccntgctgtgcgccggtgtgtgatttccctgttttaagtggcccctgaggataacagtgaagtgctgtctagcattcttctgcgcaggaaggcggagatctgccctgcggagaaagtatgcgtgctggataagcattactgagcatgacacagagcaccgttgaccccgagtgcagcgttagtgaaccggccaatgtgctgggggattttaaatggaatcacacagaagctgaggctgaggattgatctgtgagtaacaagttgtgaatgaggctggcaggagctagcctgggagtaagattcagtgtttgntaacagcgtgcaggcattaagccagggaactgaaagtncccacanngnctttggcaagtaagaagtcg

SEQ ID NO: 20 - DNA, 888 bp, Artificial Sequence
  Description of Artificial Sequence: Note = Synthetic Construct
  misc_feature (4)..(5): n is a, c, g, or t
  misc_feature (20)..(20): n is a, c, g, or t
  misc_feature (26)..(26): n is a, c, g, or t
  misc_feature (34)..(34): n is a, c, g, or t
  misc_feature (43)..(43): n is a, c, g, or t
  misc_feature (50)..(50): n is a, c, g, or t
  misc_feature (64)..(64): n is a, c, g, or t
  misc_feature (67)..(67): n is a, c, g, or t
  misc_feature (73)..(73): n is a, c, g, or t
  misc_feature (88)..(88): n is a, c, g, or t
  misc_feature (93)..(93): n is a, c, g, or t
  misc_feature (113)..(113): n is a, c, g, or t
  misc_feature (119)..(119): n is a, c, g, or t
  misc_feature (125)..(126): n is a, c, g, or t
  misc_feature (134)..(134): n is a, c, g, or t
  misc_feature (136)..(136): n is a, c, g, or t
  misc_feature (167)..(167): n is a, c, g, or t
  misc_feature (173)..(173): n is a, c, g, or t
  misc_feature (193)..(193): n is a, c, g, or t
  misc_feature (213)..(213): n is a, c, g, or t
  misc_feature (229)..(229): n is a, c, g, or t
  misc_feature (236)..(236): n is a, c, g, or t
  misc_feature (241)..(241): n is a, c, g, or t
  misc_feature (253)..(253): n is a, c, g, or t
  misc_feature (262)..(263): n is a, c, g, or t
  misc_feature (265)..(265): n is a, c, g, or t
  misc_feature (269)..(269): n is a, c, g, or t
  misc_feature (299)..(299): n is a, c, g, or t
  misc_feature (322)..(322): n is a, c, g, or t
  misc_feature (350)..(350): n is a, c, g, or t
  misc_feature (356)..(356): n is a, c, g, or t
  misc_feature (360)..(360): n is a, c, g, or t
  misc_feature (362)..(362): n is a, c, g, or t
  misc_feature (372)..(372): n is a, c, g, or t
  misc_feature (424)..(424): n is a, c, g, or t
  misc_feature (471)..(471): n is a, c, g, or t
  misc_feature (508)..(508): n is a, c, g, or t
  misc_feature (521)..(521): n is a, c, g, or t
  misc_feature (539)..(539): n is a, c, g, or t
  misc_feature (541)..(541): n is a, c, g, or t
  misc_feature (550)..(550): n is a, c, g, or t
  misc_feature (570)..(570): n is a, c, g, or t
  misc_feature (576)..(576): n is a, c, g, or t
  misc_feature (627)..(628): n is a, c, g, or t
  misc_feature (634)..(634): n is a, c, g, or t
  misc_feature (655)..(655): n is a, c, g, or t
  misc_feature (684)..(684): n is a, c, g, or t
  misc_feature (697)..(697): n is a, c, g, or t
  misc_feature (729)..(729): n is a, c, g, or t
  misc_feature (750)..(750): n is a, c, g, or t
  misc_feature (756)..(756): n is a, c, g, or t
  misc_feature (763)..(763): n is a, c, g, or t
  misc_feature (778)..(778): n is a, c, g, or t
  misc_feature (827)..(827): n is a, c, g, or t
  misc_feature (854)..(854): n is a, c, g, or t
  misc_feature (856)..(856): n is a, c, g, or t
  misc_feature (864)..(864): n is a, c, g, or t
  misc_feature (873)..(873): n is a, c, g, or t
aggnnggggggggaaacttntttatntggaaaanttttgtttnggcgggnaaggagtttttaanaangttaanggaaaaagcttttanttaanatgacctttttgggggaaanacaaanttggtnngtgtattngngaaaaagatttattataagattttttataanattttngggggggaaatatttcaaanaaaattctgtaacaaaaggntttttgttttttgttntccaagnagttntccaggtagttntcaacaacnnangccntagggaaggacatcatatggatattttcanagatttgtttttaggaaacattntaaagtcaaggttaagatgacagtcaantcccangagngnggtaactgtntgcttctttatttaaaattcaatattcaggatttcatttatactaacaagantaattaccatcttaatgaaacataatttgaataatttgcaaacaatntgatttttcttgaatatacatgttactaaaatattanggatgcaaatagntaataaacaaatagatangnaaccatggnacaccccttctgtgattggngggacntgggcataaggcttgtttgtataataatgttcatattttacattcttcctnngagganggtcctccctgttaagaaaangactccaggataaggagacagcaccagtntaggaagtgaggntctgtttaatgtcttagcaaagtagtaaatgntgggaccatcagaatagcccntaaggntgtgganagaactctaaaagcntgatatatatatatatatatatatatatatatatatatatatatatatntatataaagaggcagtattgaaagacntncaccaatngagctggcnagctagaagaggtcg

SEQ ID NO: 21 - DNA, 903 bp, Artificial Sequence
  Description of Artificial Sequence: Note = Synthetic Construct
  misc_feature (17)..(18): n is a, c, g, or t
  misc_feature (24)..(24): n is a, c, g, or t
  misc_feature (27)..(27): n is a, c, g, or t
  misc_feature (31)..(31): n is a, c, g, or t
  misc_feature (45)..(45): n is a, c, g, or t
  misc_feature (49)..(49): n is a, c, g, or t
  misc_feature (53)..(53): n is a, c, g, or t
  misc_feature (91)..(91): n is a, c, g, or t
  misc_feature (136)..(136): n is a, c, g, or t
  misc_feature (146)..(146): n is a, c, g, or t
  misc_feature (163)..(163): n is a, c, g, or t
  misc_feature (183)..(183): n is a, c, g, or t
  misc_feature (199)..(199): n is a, c, g, or t
  misc_feature (204)..(204): n is a, c, g, or t
  misc_feature (207)..(207): n is a, c, g, or t
  misc_feature (220)..(220): n is a, c, g, or t
  misc_feature (265)..(265): n is a, c, g, or t
  misc_feature (317)..(317): n is a, c, g, or t
  misc_feature (330)..(330): n is a, c, g, or t
  misc_feature (342)..(342): n is a, c, g, or t
  misc_feature (364)..(364): n is a, c, g, or t
  misc_feature (367)..(367): n is a, c, g, or t
  misc_feature (393)..(393): n is a, c, g, or t
  misc_feature (445)..(445): n is a, c, g, or t
  misc_feature (468)..(468): n is a, c, g, or t
  misc_feature (474)..(474): n is a, c, g, or t
  misc_feature (493)..(493): n is a, c, g, or t
  misc_feature (630)..(630): n is a, c, g, or t
  misc_feature (641)..(641): n is a, c, g, or t
  misc_feature (698)..(698): n is a, c, g, or t
  misc_feature (712)..(712): n is a, c, g, or t
  misc_feature (840)..(840): n is a, c, g, or t
  misc_feature (879)..(879): n is a, c, g, or t
  misc_feature (882)..(882): n is a, c, g, or t
cttggaaggtttttttnncaaaanccngggngggttttttttaanaaanaggngaaaagatttggaaacttttttttttggttgaagttanttggggattgggggaaaaattaaaaggattcaaagttcccatggnttggaagtanaacttttattcagaagngaaagttttaataatgaaanatgtttttttggattnacggnggnggaattggggagnggagagagaagagagagagagagggagagagagccggatccgcantcgggggtttctaccggcagagccaggacggagagggttttcggcagccgcngcgggttcggagnttttaaggtttnttaatcttggaaggtgtctganatnaccccgtttcttgtcggtgatgtttngtacaagctttcatttcttcaggatttcggagcgccaattactgccccgatntggtgtttatgtttgcccgttcntgcgcntggccccgcgcccgcccgngagctgcgttttccctggccgcgcggcccgagggggtgggtggggggccttggcccgcgcaccccagcgcaagggaggggtccccttcattttttttcattgacttcagcaccatgtgatcaggaagtctggctccntccatttcccntcccgactgaagggaaacattgtgtagcagcccgccgcggccactggtgggatggcnttcgctggcctgangtagggggataaaaataaccggcatatttaaggccggagcaggaatcccggcgctcacacgcggcctggtcagttcccgaagccgccagcagcgctctgcgcagcgagctgctgctgcgccagccagntcgggagtgcggacaccgtgaaagaccttcacctatagngcntggcaagctagaagaggtcgt

SEQ ID NO: 22 - DNA, 918 bp, Artificial Sequence
  Description of Artificial Sequence: Note = Synthetic Construct
  misc_feature (16)..(16): n is a, c, g, or t
  misc_feature (30)..(30): n is a, c, g, or t
  misc_feature (42)..(42): n is a, c, g, or t
  misc_feature (48)..(48): n is a, c, g, or t
  misc_feature (58)..(58): n is a, c, g, or t
  misc_feature (62)..(62): n is a, c, g, or t
  misc_feature (67)..(67): n is a, c, g, or t
  misc_feature (73)..(73): n is a, c, g, or t
  misc_feature (79)..(79): n is a, c, g, or t
  misc_feature (89)..(89): n is a, c, g, or t
  misc_feature (101)..(101): n is a, c, g, or t
  misc_feature (106)..(106): n is a, c, g, or t
  misc_feature (127)..(127): n is a, c, g, or t
  misc_feature (129)..(129): n is a, c, g, or t
  misc_feature (141)..(141): n is a, c, g, or t
  misc_feature (144)..(144): n is a, c, g, or t
  misc_feature (152)..(152): n is a, c, g, or t
  misc_feature (158)..(158): n is a, c, g, or t
  misc_feature (163)..(163): n is a, c, g, or t
  misc_feature (181)..(181): n is a, c, g, or t
  misc_feature (211)..(211): n is a, c, g, or t
  misc_feature (214)..(214): n is a, c, g, or t
  misc_feature (221)..(222): n is a, c, g, or t
  misc_feature (295)..(295): n is a, c, g, or t
  misc_feature (297)..(297): n is a, c, g, or t
  misc_feature (306)..(306): n is a, c, g, or t
  misc_feature (314)..(314): n is a, c, g, or t
  misc_feature (320)..(320): n is a, c, g, or t
  misc_feature (335)..(335): n is a, c, g, or t
  misc_feature (340)..(340): n is a, c, g, or t
  misc_feature (353)..(353): n is a, c, g, or t
  misc_feature (362)..(362): n is a, c, g, or t
  misc_feature (377)..(377): n is a, c, g, or t
  misc_feature (409)..(409): n is a, c, g, or t
  misc_feature (412)..(413): n is a, c, g, or t
  misc_feature (425)..(425): n is a, c, g, or t
  misc_feature (450)..(450): n is a, c, g, or t
  misc_feature (480)..(480): n is a, c, g, or t
  misc_feature (644)..(644): n is a, c, g, or t
  misc_feature (861)..(861): n is a, c, g, or t
  misc_feature (900)..(900): n is a, c, g, or t
  misc_feature (912)..(912): n is a, c, g, or t
tcgggggcaggaaaantttggggttttcgnaaaaaaaaaaangggcanaaacccggtnaacntattngttttnggcccngaaagtaaanaatttttttttnaaaanatggaaaaattgaaaaggganangcagggaagggnggnattttatntccaantttcnggttcctacttttttccngattctgtcagtttcgctttaagcaaaggngangaagggnnagtttcagaagttaggcttgcctgagaaaatttcaatgggtggcaattcttaggactcaggacaggattcagngnggactaatntgcatttngggatntgtccctggggtccntaagntccggaccggganagatgttcnagggggagacccaantaacccaaaggactgaaattatcatggcagcnacnnaccagtagttgntctggtaatagagcagattgctcanaaacacggttgttccatttggatatatccntgaagtccggccgtgcgaaacgatcagagcccgggaagaaatcatcccaggcacggagcggggcaaggtttaacgtccatgttcttttgcttggcgagcttcgccttcggaatccggaggcggcggcggtagcaaccagctgaatgaaagatgacagcggctcnttcggattggctctgcggttagagcaccgcagggcccagaaaattggccgcgggcgggtgtgttggtctttctgtgattggctggaagtggttagtgacggaaaactgtgggctttaccaaatgtaaaacggagtactaacaaaaagtaaccagcggaaatgcccccctaaactaaaggtggtgtcagtagtctctctggcagtttaaatacaaacnatctctttttaggcattgttttgaaagtccccacaaggntttgcaagtaanaagtcg

SEQ ID NO: 23 - DNA, 309 bp, Artificial Sequence
  Description of Artificial Sequence: Note = Synthetic Construct
  misc_feature (24)..(24): n is a, c, g, or t
  misc_feature (75)..(75): n is a, c, g, or t
  misc_feature (83)..(83): n is a, c, g, or t
  misc_feature (99)..(99): n is a, c, g, or t
  misc_feature (109)..(109): n is a, c, g, or t
  misc_feature (120)..(120): n is a, c, g, or t
  misc_feature (123)..(123): n is a, c, g, or t
  misc_feature (288)..(289): n is a, c, g, or t
  misc_feature (307)..(307): n is a, c, g, or t
agagagggtttagcacaggcagcntattcccagtttgtgctgtagaactggaacctcaggcctcattctgaaatntgcagccntccccagcatccttcntggcacagcntggcacagacntgntaagtgtctattagtgactaatacaaaggagtatttcagaacgttggcacatctcagcacgttgcaactggctggagctggttgagctcttgctgcttccatatccctttgtagctgctctccacttttctgaaccccgggtccatgtgaaagtccccacaaggnnctttgcaagtagagaagncg

SEQ ID NO: 24 - DNA, 904 bp, Artificial Sequence
  Description of Artificial Sequence: Note = Synthetic Construct
  misc_feature (14)..(14): n is a, c, g, or t
  misc_feature (21)..(21): n is a, c, g, or t
  misc_feature (35)..(35): n is a, c, g, or t
  misc_feature (37)..(37): n is a, c, g, or t
  misc_feature (48)..(48): n is a, c, g, or t
  misc_feature (51)..(52): n is a, c, g, or t
  misc_feature (69)..(69): n is a, c, g, or t
  misc_feature (80)..(80): n is a, c, g, or t
  misc_feature (82)..(82): n is a, c, g, or t
  misc_feature (91)..(91): n is a, c, g, or t
  misc_feature (108)..(108): n is a, c, g, or t
  misc_feature (115)..(115): n is a, c, g, or t
  misc_feature (129)..(129): n is a, c, g, or t
  misc_feature (201)..(201): n is a, c, g, or t
  misc_feature (214)..(214): n is a, c, g, or t
  misc_feature (276)..(276): n is a, c, g, or t
  misc_feature (289)..(290): n is a, c, g, or t
  misc_feature (296)..(296): n is a, c, g, or t
  misc_feature (308)..(308): n is a, c, g, or t
  misc_feature (368)..(368): n is a, c, g, or t
  misc_feature (413)..(413): n is a, c, g, or t
  misc_feature (451)..(452): n is a, c, g, or t
  misc_feature (467)..(467): n is a, c, g, or t
  misc_feature (473)..(473): n is a, c, g, or t
  misc_feature (635)..(635): n is a, c, g, or t
  misc_feature (864)..(864): n is a, c, g, or t
  misc_feature (872)..(872): n is a, c, g, or t
  misc_feature (883)..(884): n is a, c, g, or t
  misc_feature (902)..(902): n is a, c, g, or t
tttcatttaaaacncgggggntgaacccaatcttnanggtggcagtgnggnngatcttaacggtttttnagaaaaaaaantncttcgctcncacccccaagcctcccnttcttancagcttttttatangaaaaaagatgataacgaaattttaaaaaccgtcgttagaggaaatgaaggttcagccgaccattacctganagtaatgaaggtnttccggagggttgccttccaatcccagatggatttgagtttcaggatcaattcagttaccgntgaccatccaccnncctccngtataatcattngatgaggatgaatggtgagtgagtgatgatgatgatgatgatgatgaagggatgagaagnacactatgataacaagtgtctcagtccacattaaggtttgcctgnaaattagtgcataagccatgggagacaaattcttttcnnacacaattaatagtntcttantccttcccatcttctctgccccattctgttttccaccacaggtctgcagcgggctacagcttccagtctccaagcaaataccagaactggaggagaaaattccagtccagtgagtcatgggcagggggaggggtggggtaagggcagtggcgctcattcctnacatggtgtcttctcttgcctagcctgggatctgagggcaagagaacctgtaagcttgatttgatttccactgctgactggagtcactgccaagggatttgggacttctccatctctctctctaacctgaaatccttaggattctattatttcaccggaccagagctgtagcagagatgagctccaagtttgaaatgagaaaggggaaattgagagctatgagctaggngcgaaagnccccacaaagnntttggcaagtagaaaagncg

SEQ ID NO: 25 - DNA, 883 bp, Artificial Sequence
  Description of Artificial Sequence: Note = Synthetic Construct
  misc_feature (15)..(15): n is a, c, g, or t
  misc_feature (21)..(21): n is a, c, g, or t
  misc_feature (29)..(29): n is a, c, g, or t
  misc_feature (38)..(38): n is a, c, g, or t
  misc_feature (45)..(45): n is a, c, g, or t
  misc_feature (59)..(59): n is a, c, g, or t
  misc_feature (62)..(62): n is a, c, g, or t
  misc_feature (68)..(68): n is a, c, g, or t
  misc_feature (83)..(83): n is a, c, g, or t
  misc_feature (88)..(88): n is a, c, g, or t
  misc_feature (108)..(108): n is a, c, g, or t
  misc_feature (114)..(114): n is a, c, g, or t
  misc_feature (120)..(121): n is a, c, g, or t
  misc_feature (129)..(129): n is a, c, g, or t
  misc_feature (131)..(131): n is a, c, g, or t
  misc_feature (162)..(162): n is a, c, g, or t
  misc_feature (168)..(168): n is a, c, g, or t
  misc_feature (188)..(188): n is a, c, g, or t
  misc_feature (208)..(208): n is a, c, g, or t
  misc_feature (224)..(224): n is a, c, g, or t
  misc_feature (231)..(231): n is a, c, g, or t
  misc_feature (236)..(236): n is a, c, g, or t
  misc_feature (248)..(248): n is a, c, g, or t
  misc_feature (257)..(258): n is a, c, g, or t
  misc_feature (260)..(260): n is a, c, g, or t
  misc_feature (264)..(264): n is a, c, g, or t
  misc_feature (294)..(294): n is a, c, g, or t
  misc_feature (317)..(317): n is a, c, g, or t
  misc_feature (345)..(345): n is a, c, g, or t
  misc_feature (351)..(351): n is a, c, g, or t
  misc_feature (355)..(355): n is a, c, g, or t
  misc_feature (357)..(357): n is a, c, g, or t
  misc_feature (367)..(367): n is a, c, g, or t
  misc_feature (419)..(419): n is a, c, g, or t
  misc_feature (466)..(466): n is a, c, g, or t
  misc_feature (503)..(503): n is a, c, g, or t
  misc_feature (516)..(516): n is a, c, g, or t
  misc_feature (534)..(534): n is a, c, g, or t
  misc_feature (536)..(536): n is a, c, g, or t
  misc_feature (545)..(545): n is a, c, g, or t
  misc_feature (565)..(565): n is a, c, g, or t
  misc_feature (571)..(571): n is a, c, g, or t
  misc_feature (622)..(623): n is a, c, g, or t
  misc_feature (629)..(629): n is a, c, g, or t
  misc_feature (650)..(650): n is a, c, g, or t
  misc_feature (679)..(679): n is a, c, g, or t
  misc_feature (692)..(692): n is a, c, g, or t
  misc_feature (724)..(724): n is a, c, g, or t
  misc_feature (745)..(745): n is a, c, g, or t
  misc_feature (751)..(751): n is a, c, g, or t
  misc_feature (758)..(758): n is a, c, g, or t
  misc_feature (773)..(773): n is a, c, g, or t
  misc_feature (822)..(822): n is a, c, g, or t
  misc_feature (849)..(849): n is a, c, g, or t
  misc_feature (851)..(851): n is a, c, g, or t
  misc_feature (859)..(859): n is a, c, g, or t
  misc_feature (868)..(868): n is a, c, g, or t
ggggggggaaacttntttatntggaaaanttttgtttnggcgggnaaggagtttttaanaangttaanggaaaaagcttttanttaanatgacctttttgggggaaanacaaanttggtnngtgtattngngaaaaagatttattataagattttttataanattttngggggggaaatatttcaaanaaaattctgtaacaaaaggntttttgttttttgttntccaagnagttntccaggtagttntcaacaacnnangccntagggaaggacatcatatggatattttcanagatttgtttttaggaaacattntaaagtcaaggttaagatgacagtcaantcccangagngnggtaactgtntgcttctttatttaaaattcaatattcaggatttcatttatactaacaagantaattaccatcttaatgaaacataatttgaataatttgcaaacaatntgatttttcttgaatatacatgttactaaaatattanggatgcaaatagntaataaacaaatagatangnaaccatggnacaccccttctgtgattggngggacntgggcataaggcttgtttgtataataatgttcatattttacattcttcctnngagganggtcctccctgttaagaaaangactccaggataaggagacagcaccagtntaggaagtgaggntctgtttaatgtcttagcaaagtagtaaatgntgggaccatcagaatagcccntaaggntgtgganagaactctaaaagcntgatatatatatatatatatatatatatatatatatatatatatatatntatataaagaggcagtattgaaagacntncaccaatngagctggcnagctagaagaggtcg

SEQ ID NO: 26 - DNA, 924 bp, Artificial Sequence
  Description of Artificial Sequence: Note = Synthetic Construct
  misc_feature (10)..(10): n is a, c, g, or t
  misc_feature (15)..(15): n is a, c, g, or t
  misc_feature (26)..(26): n is a, c, g, or t
  misc_feature (30)..(30): n is a, c, g, or t
  misc_feature (34)..(34): n is a, c, g, or t
  misc_feature (39)..(39): n is a, c, g, or t
  misc_feature (102)..(102): n is a, c, g, or t
  misc_feature (117)..(117): n is a, c, g, or t
  misc_feature (119)..(119): n is a, c, g, or t
  misc_feature (122)..(122): n is a, c, g, or t
  misc_feature (125)..(126): n is a, c, g, or t
  misc_feature (129)..(129): n is a, c, g, or t
  misc_feature (192)..(192): n is a, c, g, or t
  misc_feature (196)..(196): n is a, c, g, or t
  misc_feature (286)..(286): n is a, c, g, or t
  misc_feature (298)..(298): n is a, c, g, or t
  misc_feature (334)..(334): n is a, c, g, or t
  misc_feature (337)..(337): n is a, c, g, or t
  misc_feature (339)..(339): n is a, c, g, or t
  misc_feature (346)..(346): n is a, c, g, or t
  misc_feature (377)..(377): n is a, c, g, or t
  misc_feature (441)..(441): n is a, c, g, or t
  misc_feature (530)..(530): n is a, c, g, or t
  misc_feature (603)..(603): n is a, c, g, or t
  misc_feature (611)..(611): n is a, c, g, or t
  misc_feature (624)..(624): n is a, c, g, or t
  misc_feature (675)..(675): n is a, c, g, or t
  misc_feature (713)..(713): n is a, c, g, or t
  misc_feature (726)..(726): n is a, c, g, or t
  misc_feature (735)..(735): n is a, c, g, or t
  misc_feature (874)..(874): n is a, c, g, or t
  misc_feature (888)..(888): n is a, c, g, or t
  misc_feature (897)..(897): n is a, c, g, or t
  misc_feature (902)..(903): n is a, c, g, or t
tttggaaggnttttnaggaaagaaantgtntttnagggnagggaaccctattccgacgggttgggggaaaattttgggttgacccttcgttaaaaagggttncggtaaaagggggcnangtnttnnaanaaaaataatagtaatagtagtagtaatagtattaataataataataattgcaggaatcctgtnaccntcaggaattggggaagtagtttcttattttaggaccaggtgttttgtttcaggggagttattttttgttttgtggatgggatgagtggtntcaattgctttnaaaaacctgtattagttttggcacagttagtgtgtntcngnttcgttngaggagtttgaactggatggtaggcaatggntgcacagattcatagtggccagagttagagtaaatgcttgcggagcagtcagaatagatgagantcagggacccggcagatgatgcagggagaatgtaagagcagaaggtggtgggtagcatgtggaatgcacatttccaggcgtgacatgantcggaacagctgtgactgcttagaccaaagtgatcccatcaacacggccattcagtaaggaagggtcatgggntccccccntcccttaggattnacatacagataatgattgattggtggaccaggggaatggggaaaaatgtcnttttcgttggtatagtcactggtagctgcccatgtttntataaacaaattntaaagaaantcattggttcatacacgtaagaagacatcaaaacagaactgaggcaagttgggaagagaaatgggattagtaggagagggtcaagaaaaggcaaaggtatgtgcacatgcatgaatacattgtatacatgtatgaaagngccacaatgatganttaccccanatggnngtttggcaagtaaaagagtcg

SEQ ID NO: 27 - DNA, 482 bp, Artificial Sequence
  Description of Artificial Sequence: Note = Synthetic Construct
  misc_feature (21)..(21): n is a, c, g, or t
  misc_feature (26)..(26): n is a, c, g, or t
  misc_feature (38)..(38): n is a, c, g, or t
  misc_feature (40)..(40): n is a, c, g, or t
  misc_feature (44)..(44): n is a, c, g, or t
  misc_feature (57)..(57): n is a, c, g, or t
  misc_feature (66)..(66): n is a, c, g, or t
  misc_feature (68)..(69): n is a, c, g, or t
  misc_feature (78)..(78): n is a, c, g, or t
  misc_feature (84)..(85): n is a, c, g, or t
  misc_feature (91)..(91): n is a, c, g, or t
  misc_feature (93)..(93): n is a, c, g, or t
  misc_feature (99)..(99): n is a, c, g, or t
  misc_feature (106)..(107): n is a, c, g, or t
  misc_feature (136)..(136): n is a, c, g, or t
  misc_feature (138)..(138): n is a, c, g, or t
  misc_feature (166)..(166): n is a, c, g, or t
  misc_feature (172)..(172): n is a, c, g, or t
  misc_feature (174)..(174): n is a, c, g, or t
  misc_feature (180)..(181): n is a, c, g, or t
  misc_feature (188)..(189): n is a, c, g, or t
  misc_feature (195)..(195): n is a, c, g, or t
  misc_feature (207)..(207): n is a, c, g, or t
  misc_feature (209)..(209): n is a, c, g, or t
  misc_feature (212)..(212): n is a, c, g, or t
  misc_feature (218)..(218): n is a, c, g, or t
  misc_feature (222)..(223): n is a, c, g, or t
  misc_feature (234)..(234): n is a, c, g, or t
  misc_feature (241)..(241): n is a, c, g, or t
  misc_feature (243)..(243): n is a, c, g, or t
  misc_feature (248)..(248): n is a, c, g, or t
  misc_feature (255)..(255): n is a, c, g, or t
  misc_feature (257)..(257): n is a, c, g, or t
  misc_feature (264)..(265): n is a, c, g, or t
  misc_feature (267)..(267): n is a, c, g, or t
  misc_feature (273)..(273): n is a, c, g, or t
  misc_feature (281)..(281): n is a, c, g, or t
  misc_feature (283)..(283): n is a, c, g, or t
  misc_feature (290)..(290): n is a, c, g, or t
  misc_feature (296)..(297): n is a, c, g, or t
  misc_feature (304)..(304): n is a, c, g, or t
  misc_feature (319)..(320): n is a, c, g, or t
  misc_feature (325)..(325): n is a, c, g, or t
  misc_feature (327)..(327): n is a, c, g, or t
  misc_feature (330)..(330): n is a, c, g, or t
  misc_feature (339)..(339): n is a, c, g, or t
  misc_feature (341)..(341): n is a, c, g, or t
  misc_feature (343)..(343): n is a, c, g, or t
  misc_feature (348)..(348): n is a, c, g, or t
  misc_feature (350)..(350): n is a, c, g, or t
  misc_feature (353)..(353): n is a, c, g, or t
  misc_feature (371)..(371): n is a, c, g, or t
  misc_feature (376)..(377): n is a, c, g, or t
  misc_feature (395)..(395): n is a, c, g, or t
  misc_feature (398)..(398): n is a, c, g, or t
  misc_feature (414)..(414): n is a, c, g, or t
  misc_feature (417)..(417): n is a, c, g, or t
  misc_feature (419)..(419): n is a, c, g, or t
  misc_feature (426)..(426): n is a, c, g, or t
  misc_feature (432)..(432): n is a, c, g, or t
  misc_feature (450)..(450): n is a, c, g, or t
  misc_feature (469)..(469): n is a, c, g, or t
  misc_feature (474)..(474): n is a, c, g, or t
tctctcctgaggggggttttntggangaatagaagaananaccncctctttgtttcntcctgtggngnnccctgctgntaaagnngatttncncggtgntatacanntaagaaggaggatctctccccccattgtnanagaaccccgtgtgtggggagggggtgtngccacnanccaganntggcccnngggtcntctccccactcntntgnataacntctnncctccacaaanaccccananaaaancaccccncntgtgagnncngcagangcgccctntnacaaganaagagnncatgtgntgtggccctgtgctnngacantntanactcttctntngnggggngnggnctgtggttttataagagngtgtnnccgtgggggggagagtantcnttttatatagagaganagngncctgtgnaaactncctctgagaagagcaccntggtgttctctcccatctnctagnaggggagg

SEQ ID NO: 28 - DNA, 460 bp, Artificial Sequence
  Description of Artificial Sequence: Note: = synthetic construct
  misc_feature (430)..(430): n is a, c, g, or t
tagcttctctgtgaggggtagaactcaagctcccccatgaacaggctttggggttcctgccatcccctggggctgttcattaggtgcccacacagacttctcatgccatgactcacacttgacgtcacagagcacacaaagagcacaaaagcaggctgaccacatccggccatgcacacccctttaacagtcccaagctttctctctctcttctaagtcactgccctgggaagacggtttcatacccaagctgatgtgcacttatttctttgtgttattgctctgacagtctcacagtgctctgcaaacactctgcattcgcctttaccacaccagaagaaattcctctttgtgcagggaaaaatacattcgtcttagtagcttctactttccagcttgtccctagtctgtctgatatgtggttacgtantgttaggggccacggaaggggggggggggg

SEQ ID NO: 29 - DNA, 465 bp, Artificial Sequence
  Description of Artificial Sequence: Note: = synthetic construct
  misc_feature (82)..(82): n is a, c, g, or t
  misc_feature (192)..(192): n is a, c, g, or t
  misc_feature (194)..(194): n is a, c, g, or t
  misc_feature (328)..(328): n is a, c, g, or t
  misc_feature (442)..(442): n is a, c, g, or t
tcccaagacaagaggggctgaagaacgggggggggaagaatcaggagtgtgtcgctgcttcccacataaagacggcacctanatctgtctctctcggtgtctcctccccacctggggcagggtgagctctctagacaagagagagactgtcacagagagagagagatgtgtcacccctgtggagatcagagncnccgacacctaggggacaaatggggatctcttttttttttctctctcgagacagggggtctctgtgcaacacttgctgttctggagatgttctgtagaccagggtgtcccccaactcagagagcctcctcctttncacaactgtgtcgccgccgccgccgccgccgccatcaccaggctatatttactattatctctattactattgttgtgtgttgtgttgagacaggatgctcacgcataaccctanctatcctagtgatagaccccacc

SEQ ID NO: 30 - DNA, 568 bp, Artificial Sequence
  escription of Artificial Sequence: Note: = synthetic construct
  misc_feature (2)..(3): n is a, c, g, or t
  misc_feature (5)..(6): n is a, c, g, or t
  misc_feature (9)..(9): n is a, c, g, or t
  misc_feature (14)..(14): n is a, c, g, or t
  misc_feature (20)..(20): n is a, c, g, or t
  misc_feature (24)..(24): n is a, c, g, or t
  misc_feature (32)..(32): n is a, c, g, or t
  misc_feature (35)..(35): n is a, c, g, or t
  misc_feature (39)..(39): n is a, c, g, or t
  misc_feature (62)..(63): n is a, c, g, or t
  misc_feature (67)..(67): n is a, c, g, or t
  misc_feature (69)..(69): n is a, c, g, or t
  misc_feature (72)..(72): n is a, c, g, or t
  misc_feature (74)..(74): n is a, c, g, or t
  misc_feature (80)..(80): n is a, c, g, or t
  misc_feature (82)..(82): n is a, c, g, or t
  misc_feature (95)..(96): n is a, c, g, or t
  misc_feature (111)..(113): n is a, c, g, or t
  misc_feature (125)..(125): n is a, c, g, or t
  misc_feature (133)..(133): n is a, c, g, or t
  misc_feature (135)..(136): n is a, c, g, or t
  misc_feature (143)..(143): n is a, c, g, or t
  misc_feature (152)..(153): n is a, c, g, or t
  misc_feature (155)..(155): n is a, c, g, or t
  misc_feature (164)..(165): n is a, c, g, or t
  misc_feature (167)..(167): n is a, c, g, or t
  misc_feature (170)..(170): n is a, c, g, or t
  misc_feature (174)..(174): n is a, c, g, or t
  misc_feature (178)..(178): n is a, c, g, or t
  misc_feature (183)..(183): n is a, c, g, or t
  misc_feature (185)..(185): n is a, c, g, or t
  misc_feature (189)..(189): n is a, c, g, or t
  misc_feature (194)..(194): n is a, c, g, or t
  misc_feature (201)..(201): n is a, c, g, or t
  misc_feature (224)..(224): n is a, c, g, or t
  misc_feature (229)..(230): n is a, c, g, or t
  misc_feature (233)..(233): n is a, c, g, or t
  misc_feature (239)..(239): n is a, c, g, or t
  misc_feature (253)..(253): n is a, c, g, or t
  misc_feature (261)..(261): n is a, c, g, or t
  misc_feature (263)..(263): n is a, c, g, or t
  misc_feature (268)..(268): n is a, c, g, or t
  misc_feature (274)..(274): n is a, c, g, or t
  misc_feature (294)..(294): n is a, c, g, or t
  misc_feature (297)..(297): n is a, c, g, or t
  misc_feature (300)..(300): n is a, c, g, or t
  misc_feature (302)..(302): n is a, c, g, or t
  misc_feature (304)..(304): n is a, c, g, or t
  misc_feature (313)..(313): n is a, c, g, or t
  misc_feature (315)..(315): n is a, c, g, or t
  misc_feature (317)..(318): n is a, c, g, or t
  misc_feature (321)..(321): n is a, c, g, or t
  misc_feature (341)..(341): n is a, c, g, or t
  misc_feature (344)..(344): n is a, c, g, or t
  misc_feature (346)..(346): n is a, c, g, or t
  misc_feature (350)..(350): n is a, c, g, or t
  misc_feature (354)..(354): n is a, c, g, or t
  misc_feature (364)..(364): n is a, c, g, or t
  misc_feature (372)..(372): n is a, c, g, or t
  misc_feature (379)..(379): n is a, c, g, or t
  misc_feature (393)..(393): n is a, c, g, or t
  misc_feature (405)..(405): n is a, c, g, or t
  misc_feature (415)..(415): n is a, c, g, or t
  misc_feature (420)..(420): n is a, c, g, or t
  misc_feature (427)..(427): n is a, c, g, or t
  misc_feature (435)..(436): n is a, c, g, or t
  misc_feature (463)..(463): n is a, c, g, or t
  misc_feature (513)..(513): n is a, c, g, or t
  misc_feature (521)..(521): n is a, c, g, or t
  misc_feature (527)..(527): n is a, c, g, or t
  misc_feature (532)..(532): n is a, c, g, or t
  misc_feature (540)..(540): n is a, c, g, or t
  misc_feature (552)..(552): n is a, c, g, or t
  misc_feature (557)..(557): n is a, c, g, or t
  misc_feature (565)..(565): n is a, c, g, or t
tnncnnttncctgnggccgngtanctctgagnganagtntccccgagagggggggtctcacnntagntntananagtatngngtgctcgagtttnnagagagctctctctnnntctctctccccngagctatngnnttagggntatggcacnncncgtctctcnncnccntatngagnggtgngntatnggggngagagtntctgcccgagacccacattctcngagtnnggnagagtntgggagacacacanctccgggnanatctntctccncccccccaggggcggtggtncanatngncnacagagccncngnnttntatgtggagaggggatatcncancncacncccngagcacaggntccacacncagagangtgtctctccccancacacaagcacntctggtgagntctangttttgngagagacnntgccctgtctcccttttccccgctctnacacacatgagagggtgtgcacatcttccccatgtccctctctaaaaccnccccaganttttgnggttntgtgcaanacccttttcacnctcangggagatnttt

SEQ ID NO: 31 - DNA, 920 bp, Artificial Sequence
  Description of Artificial Sequence: Note: = synthetic construct
  misc_feature (9)..(9): n is a, c, g, or t
  misc_feature (19)..(19): n is a, c, g, or t
  misc_feature (33)..(33): n is a, c, g, or t
  misc_feature (44)..(44): n is a, c, g, or t
  misc_feature (46)..(46): n is a, c, g, or t
  misc_feature (55)..(55): n is a, c, g, or t
  misc_feature (86)..(86): n is a, c, g, or t
  misc_feature (103)..(104): n is a, c, g, or t
  misc_feature (107)..(107): n is a, c, g, or t
  misc_feature (114)..(114): n is a, c, g, or t
  misc_feature (117)..(117): n is a, c, g, or t
  misc_feature (123)..(124): n is a, c, g, or t
  misc_feature (132)..(132): n is a, c, g, or t
  misc_feature (136)..(136): n is a, c, g, or t
  misc_feature (191)..(191): n is a, c, g, or t
  misc_feature (214)..(214): n is a, c, g, or t
  misc_feature (228)..(228): n is a, c, g, or t
  misc_feature (233)..(233): n is a, c, g, or t
  misc_feature (235)..(235): n is a, c, g, or t
  misc_feature (238)..(238): n is a, c, g, or t
  misc_feature (247)..(247): n is a, c, g, or t
  misc_feature (266)..(266): n is a, c, g, or t
  misc_feature (275)..(275): n is a, c, g, or t
  misc_feature (284)..(284): n is a, c, g, or t
  misc_feature (290)..(290): n is a, c, g, or t
  misc_feature (317)..(317): n is a, c, g, or t
  misc_feature (320)..(320): n is a, c, g, or t
  misc_feature (358)..(358): n is a, c, g, or t
  misc_feature (362)..(362): n is a, c, g, or t
  misc_feature (364)..(364): n is a, c, g, or t
  misc_feature (370)..(370): n is a, c, g, or t
  misc_feature (384)..(384): n is a, c, g, or t
  misc_feature (424)..(424): n is a, c, g, or t
  misc_feature (469)..(469): n is a, c, g, or t
  misc_feature (555)..(555): n is a, c, g, or t
  misc_feature (728)..(728): n is a, c, g, or t
  misc_feature (745)..(745): n is a, c, g, or t
  misc_feature (753)..(753): n is a, c, g, or t
  misc_feature (760)..(760): n is a, c, g, or t
  misc_feature (869)..(869): n is a, c, g, or t
  misc_feature (877)..(877): n is a, c, g, or t
  misc_feature (896)..(897): n is a, c, g, or t
gagggttanttggcccaantcggcaatcatccngggaagaagangncagggtttnggcaaatcggaagatcaaggacgcaattcgnggggggggatggatagnngcnaaagggnacngaaagnnggattggnaggnaaaattaaacgggagttgtaatccaaaaggacgacaaggcaaaaacaaatccggnagtaagcaggaagcacagtgaanttgggggaggcagngtggngnaantaaaaaatngtttttttaatcccaatanggtcaacangtaggcaantggatntattagatattatatcttagcgcaagnttntcacccattggtccaacccatataacatggcggtggtnaatntntgagcntggcacaatttttnacccattagttcccaaggcagatcgccaccatgccagaanaaaatcccaattccatggtggcccagtgtgtccagccaccaatantttcttgaattcaattaaatcaccacatgaaggaatacataacacaataacatctgatccaattgataagatataatttgctcacntagacatacaaaatcctgtacattccatctcttaagaatattcataacaaactataaatgtgtagagaggaattttaatatccacttccatgttctcttggctgctcctctctcccagtctcctcctcctcctttaaaacttttttctcccacccatcatttttttttgtccnaaggacgggccttgttntatcctgnacctgcnttcgtctgcataaggccatcatcccacaggcaggactggagcaatggctcattggttaagagcacttgctgatcttgaagaagaccagggtgcaattctcagagcactncactgctncacactgaaagaccccacnngtaggtttggcaagtagaagaga

SEQ ID NO: 32 - DNA, 176 bp, Artificial Sequence
  escription of Artificial Sequence: Note: = synthetic construct
ttgaccatattatttttattcacgttgggacaaaagagcaaacgcaaaggataggaaacgaaaggaattaatttcctttcaatagagatatcggttttttttagagggaaaaaattgagtattagaaaataaaaataggtttcggaatttccggaaagaccactaaattgtaggtt

SEQ ID NO: 33 - DNA, 336 bp, Artificial Sequence
  Description of Artificial Sequence: Note: = synthetic construct
  misc_feature (8)..(8): n is a, c, g, or t
  misc_feature (10)..(10): n is a, c, g, or t
  misc_feature (16)..(16): n is a, c, g, or t
  misc_feature (22)..(22): n is a, c, g, or t
  misc_feature (27)..(27): n is a, c, g, or t
  misc_feature (35)..(35): n is a, c, g, or t
  misc_feature (45)..(45): n is a, c, g, or t
  misc_feature (50)..(50): n is a, c, g, or t
  misc_feature (59)..(59): n is a, c, g, or t
  misc_feature (61)..(61): n is a, c, g, or t
  misc_feature (65)..(65): n is a, c, g, or t
  misc_feature (67)..(67): n is a, c, g, or t
  misc_feature (73)..(73): n is a, c, g, or t
  misc_feature (81)..(81): n is a, c, g, or t
  misc_feature (85)..(85): n is a, c, g, or t
  misc_feature (95)..(95): n is a, c, g, or t
  misc_feature (100)..(100): n is a, c, g, or t
  misc_feature (103)..(103): n is a, c, g, or t
  misc_feature (119)..(120): n is a, c, g, or t
  misc_feature (122)..(122): n is a, c, g, or t
  misc_feature (130)..(130): n is a, c, g, or t
  misc_feature (132)..(132): n is a, c, g, or t
  misc_feature (139)..(140): n is a, c, g, or t
  misc_feature (142)..(142): n is a, c, g, or t
  misc_feature (145)..(147): n is a, c, g, or t
  misc_feature (149)..(149): n is a, c, g, or t
  misc_feature (152)..(152): n is a, c, g, or t
  misc_feature (154)..(154): n is a, c, g, or t
  misc_feature (159)..(159): n is a, c, g, or t
  misc_feature (168)..(168): n is a, c, g, or t
  misc_feature (179)..(179): n is a, c, g, or t
  misc_feature (188)..(188): n is a, c, g, or t
  misc_feature (197)..(197): n is a, c, g, or t
  misc_feature (199)..(199): n is a, c, g, or t
  misc_feature (205)..(206): n is a, c, g, or t
  misc_feature (213)..(213): n is a, c, g, or t
  misc_feature (216)..(216): n is a, c, g, or t
  misc_feature (220)..(220): n is a, c, g, or t
  misc_feature (229)..(229): n is a, c, g, or t
  misc_feature (232)..(232): n is a, c, g, or t
  misc_feature (254)..(254): n is a, c, g, or t
  misc_feature (273)..(273): n is a, c, g, or t
  misc_feature (275)..(275): n is a, c, g, or t
  misc_feature (297)..(298): n is a, c, g, or t
  misc_feature (312)..(312): n is a, c, g, or t
  misc_feature (314)..(314): n is a, c, g, or t
  misc_feature (319)..(319): n is a, c, g, or t
  misc_feature (328)..(328): n is a, c, g, or t
aaaagggntnccgaanaaaaanaattnggatcttntgggggcccngaggnaaaaaaaanantaancngggggngacccagngaanagacaaattnttttnccnggagtccttggggtgnnangccaaacngncgtttanngnaannngncgngntaccncttcggagngggggcgctgnaaaagaatngtgagaatncngttacnngtgttgnttnatcngagatagtngtntgtaacaaccccgattcagccngaaagttacgcatatgcgnancgttgtgtgaatcgaacctggnnaaaacagacccatngncaagnggcagaccnaacggaac

SEQ ID NO: 34 - DNA, 92 bp, Artificial Sequence
  Description of Artificial Sequence: Note: = synthetic construct
tgaataagggtacaaagattgtgtttcagaggagagaggtaacaagaaaagactcctaacgcaatggccagagggccaagaaaaagggaaaa

SEQ ID NO: 35 - DNA, 838 bp, Artificial Sequence
  Description of Artificial Sequence: Note: = synthetic construct
  misc_feature (3)..(3): n is a, c, g, or t
  misc_feature (6)..(6): n is a, c, g, or t
  misc_feature (17)..(17): n is a, c, g, or t
  misc_feature (23)..(23): n is a, c, g, or t
  misc_feature (29)..(29): n is a, c, g, or t
  misc_feature (39)..(39): n is a, c, g, or t
  misc_feature (44)..(44): n is a, c, g, or t
  misc_feature (47)..(47): n is a, c, g, or t
  misc_feature (52)..(53): n is a, c, g, or t
  misc_feature (59)..(60): n is a, c, g, or t
  misc_feature (70)..(72): n is a, c, g, or t
  misc_feature (78)..(78): n is a, c, g, or t
  misc_feature (80)..(80): n is a, c, g, or t
  misc_feature (82)..(84): n is a, c, g, or t
  misc_feature (92)..(92): n is a, c, g, or t
  misc_feature (101)..(101): n is a, c, g, or t
  misc_feature (106)..(106): n is a, c, g, or t
  misc_feature (116)..(116): n is a, c, g, or t
  misc_feature (122)..(122): n is a, c, g, or t
  misc_feature (128)..(128): n is a, c, g, or t
  misc_feature (143)..(143): n is a, c, g, or t
  misc_feature (150)..(151): n is a, c, g, or t
  misc_feature (156)..(156): n is a, c, g, or t
  misc_feature (167)..(167): n is a, c, g, or t
  misc_feature (176)..(176): n is a, c, g, or t
  misc_feature (180)..(181): n is a, c, g, or t
  misc_feature (190)..(191): n is a, c, g, or t
  misc_feature (194)..(194): n is a, c, g, or t
  misc_feature (196)..(196): n is a, c, g, or t
  misc_feature (210)..(211): n is a, c, g, or t
  misc_feature (213)..(213): n is a, c, g, or t
  misc_feature (217)..(217): n is a, c, g, or t
  misc_feature (225)..(225): n is a, c, g, or t
  misc_feature (248)..(249): n is a, c, g, or t
  misc_feature (251)..(252): n is a, c, g, or t
  misc_feature (262)..(262): n is a, c, g, or t
  misc_feature (279)..(280): n is a, c, g, or t
  misc_feature (285)..(285): n is a, c, g, or t
  misc_feature (288)..(288): n is a, c, g, or t
  misc_feature (292)..(293): n is a, c, g, or t
  misc_feature (300)..(300): n is a, c, g, or t
  misc_feature (307)..(307): n is a, c, g, or t
  misc_feature (318)..(318): n is a, c, g, or t
  misc_feature (320)..(320): n is a, c, g, or t
  misc_feature (329)..(329): n is a, c, g, or t
  misc_feature (337)..(337): n is a, c, g, or t
  misc_feature (344)..(344): n is a, c, g, or t
  misc_feature (346)..(346): n is a, c, g, or t
  misc_feature (353)..(353): n is a, c, g, or t
  misc_feature (355)..(355): n is a, c, g, or t
  misc_feature (357)..(357): n is a, c, g, or t
  misc_feature (363)..(364): n is a, c, g, or t
  misc_feature (368)..(368): n is a, c, g, or t
  misc_feature (374)..(374): n is a, c, g, or t
  misc_feature (376)..(376): n is a, c, g, or t
  misc_feature (383)..(383): n is a, c, g, or t
  misc_feature (390)..(390): n is a, c, g, or t
  misc_feature (397)..(397): n is a, c, g, or t
  misc_feature (407)..(407): n is a, c, g, or t
  misc_feature (413)..(413): n is a, c, g, or t
  misc_feature (415)..(416): n is a, c, g, or t
  misc_feature (426)..(426): n is a, c, g, or t
  misc_feature (439)..(439): n is a, c, g, or t
  misc_feature (443)..(443): n is a, c, g, or t
  misc_feature (448)..(448): n is a, c, g, or t
  misc_feature (453)..(454): n is a, c, g, or t
  misc_feature (465)..(466): n is a, c, g, or t
  misc_feature (468)..(468): n is a, c, g, or t
  misc_feature (472)..(473): n is a, c, g, or t
  misc_feature (476)..(476): n is a, c, g, or t
  misc_feature (484)..(484): n is a, c, g, or t
  misc_feature (488)..(489): n is a, c, g, or t
  misc_feature (492)..(492): n is a, c, g, or t
  misc_feature (501)..(502): n is a, c, g, or t
  misc_feature (511)..(511): n is a, c, g, or t
  misc_feature (514)..(514): n is a, c, g, or t
  misc_feature (517)..(517): n is a, c, g, or t
  misc_feature (519)..(519): n is a, c, g, or t
  misc_feature (523)..(523): n is a, c, g, or t
  misc_feature (533)..(533): n is a, c, g, or t
  misc_feature (538)..(538): n is a, c, g, or t
  misc_feature (550)..(550): n is a, c, g, or t
  misc_feature (555)..(555): n is a, c, g, or t
  misc_feature (564)..(564): n is a, c, g, or t
  misc_feature (570)..(570): n is a, c, g, or t
  misc_feature (575)..(575): n is a, c, g, or t
  misc_feature (577)..(577): n is a, c, g, or t
  misc_feature (581)..(581): n is a, c, g, or t
  misc_feature (603)..(603): n is a, c, g, or t
  misc_feature (605)..(605): n is a, c, g, or t
  misc_feature (610)..(610): n is a, c, g, or t
  misc_feature (617)..(617): n is a, c, g, or t
  misc_feature (624)..(624): n is a, c, g, or t
  misc_feature (633)..(633): n is a, c, g, or t
  misc_feature (640)..(640): n is a, c, g, or t
  misc_feature (662)..(662): n is a, c, g, or t
  misc_feature (666)..(666): n is a, c, g, or t
  misc_feature (682)..(683): n is a, c, g, or t
  misc_feature (690)..(690): n is a, c, g, or t
  misc_feature (693)..(693): n is a, c, g, or t
  misc_feature (702)..(702): n is a, c, g, or t
  misc_feature (716)..(716): n is a, c, g, or t
  misc_feature (727)..(727): n is a, c, g, or t
  misc_feature (731)..(731): n is a, c, g, or t
  misc_feature (746)..(746): n is a, c, g, or t
  misc_feature (748)..(749): n is a, c, g, or t
  misc_feature (751)..(752): n is a, c, g, or t
  misc_feature (761)..(761): n is a, c, g, or t
  misc_feature (764)..(764): n is a, c, g, or t
  misc_feature (768)..(768): n is a, c, g, or t
  misc_feature (770)..(770): n is a, c, g, or t
  misc_feature (775)..(775): n is a, c, g, or t
  misc_feature (778)..(779): n is a, c, g, or t
  misc_feature (781)..(782): n is a, c, g, or t
  misc_feature (787)..(787): n is a, c, g, or t
  misc_feature (789)..(789): n is a, c, g, or t
  misc_feature (791)..(791): n is a, c, g, or t
  misc_feature (796)..(796): n is a, c, g, or t
  misc_feature (798)..(798): n is a, c, g, or t
  misc_feature (800)..(801): n is a, c, g, or t
  misc_feature (806)..(806): n is a, c, g, or t
  misc_feature (811)..(813): n is a, c, g, or t
  misc_feature (816)..(816): n is a, c, g, or t
  misc_feature (821)..(821): n is a, c, g, or t
  misc_feature (823)..(823): n is a, c, g, or t
  misc_feature (827)..(827): n is a, c, g, or t
ggngtnattttcttctngtgaantctttnccaaatccgngggtntgncccanngccccnntttatacacnnnattacncntnnnccaaaacnctatatgtntcganatgtcccatnttaaanatatgngactcagtttgagtntccccannttggngttggggtatntgggtaaanacanngaccctctnnggngntttatttatatatnngncccnatataacncagagatctgtgtaaaaaatatnncnnttcgcggggngggagatttctctctgnngtagngcnctcnnctgagangcacagngccctgtgttntntccccctcnccgaaaanaattttntncaaaaanananaatatnnacanaccccnanaaatatnccccttntctaccncccctcaaanacaccncnntttttttttncccctcagaaatntttntaatntgggnnaaaaaaatctnngntggnnttntccccccntttnnagncgccccctnnaaacccccnctnttnanaganaaatatgtanactcntatttaaaaaanaacantttttgttngggctngggtntnccancccttcactctctttgtgggtntnccttnccatatnccccctntttgagacntttaaanaaccctctccctaattcctccncccnctgtttcccccttttnnaaaaacntcnggccccttngccccccttttctnactccctcttntccngagattttttcctcntnntnnctaattccnttnttcnantctanatnncnntgttncnancgcangntnnccccnccttnnnctnaattntngggnaggttccaacc

SEQ ID NO: 36 - DNA, 314 bp, Artificial Sequence
  Description of Artificial Sequence: Note: = synthetic construct
caaaccagaaatggcccaagggtcatctccccactcagtatgaataacatctaacctccacaaaaaccccaaaaaaaaacaccccagatgtgagaacagcagaagcgccctataacaagaaaagagaacatgtgatgtggccctgtgctaagacaatataaactcttctatagaggggagaggactgtggttttataagagagtgtaaccgtgggggggagagtaatcatttttatatagagagaaagagacctgtgaaaactacctctgagaagagcaccatggtgttctctcccatctactagaaggggagg

SEQ ID NO: 37 - DNA, 226 bp, Artificial Sequence
  Description of Artificial Sequence: Note: = synthetic construct
  misc_feature (22)..(22): n is a, c, g, or t
  misc_feature (34)..(34): n is a, c, g, or t
  misc_feature (37)..(37): n is a, c, g, or t
  misc_feature (42)..(43): n is a, c, g, or t
  misc_feature (56)..(56): n is a, c, g, or t
  misc_feature (61)..(61): n is a, c, g, or t
  misc_feature (65)..(65): n is a, c, g, or t
  misc_feature (67)..(67): n is a, c, g, or t
  misc_feature (70)..(70): n is a, c, g, or t
  misc_feature (78)..(78): n is a, c, g, or t
  misc_feature (85)..(85): n is a, c, g, or t
  misc_feature (89)..(89): n is a, c, g, or t
  misc_feature (108)..(108): n is a, c, g, or t
  misc_feature (126)..(126): n is a, c, g, or t
  misc_feature (128)..(128): n is a, c, g, or t
  misc_feature (157)..(157): n is a, c, g, or t
  misc_feature (171)..(171): n is a, c, g, or t
  misc_feature (208)..(208): n is a, c, g, or t
  misc_feature (216)..(216): n is a, c, g, or t
agggggggaaaccccttcgccncgggcctatcgnaanttttnntccaccgtaaaanatttnccangngcnccatgtanggattgngggngtagtggggggaacgattntggaggggcctaaaaggnanatagaggacgtattgtatttggttttgcngagccagtaccttngaaaaaggttggtatttttgatccggcaacaaccacngtggtagngtgttttttt

SEQ ID NO: 38 - DNA, 843 bp, Artificial Sequence
  Description of Artificial Sequence: Note: = synthetic construct
gaattaaaacgggaaagattggaattcaatttcttacagccaaaagctagaccgggcatataggagattatttcgatttagcaccttccaaagcctgccccagatttaaagtttaggggtattatttaaaagcaggttccgggaagttccaagataggcctagaggtaatggtatgcaagcagtcctaggtttcagaagagttcaaacacgggtcttcaggaaaagacggaaagtgtagattgatcaggccagcaatcatacaacagtgtttgttgtagtattaccttttctaatggttgtcactgaaaggagattattctaggtttggagatacaaaattaaaagaataaaccccaaaaggccacagacccagggtaagccctgtagccaggactagcaggccataaagaaaaaggagcacaggaaacactgtccaggcaggactggcaagccataaagataaggaaaaggaatgcaggaaccagcctgagttaatgagaaaaattaatgggacgtctggcaggaagacatctccccctagcacactccgggccatatctcaactaggtgtcctccagcccctgacttatagcacgtactctatctgctttgttatcacagatatgtttgaatgagccaattgtatgtaaccacgccaaaaccccctagctttgtctatataaccgtctgacttttgagtttcgtgttcaactcctctgtatcttgggtgagacacgtgttggcccggagcttcgttattattaaacgacctcttgctattacatcatgaccagtctggtcctgttgtaagacattggcaaaagagcctgaaaactagaaaa

SEQ ID NO: 39 - DNA, 943 bp, Artificial Sequence
  Description of Artificial Sequence: Note: = synthetic construct
  misc_feature (34)..(34): n is a, c, g, or t
  misc_feature (36)..(36): n is a, c, g, or t
  misc_feature (38)..(38): n is a, c, g, or t
  misc_feature (58)..(58): n is a, c, g, or t
  misc_feature (68)..(68): n is a, c, g, or t
  misc_feature (73)..(73): n is a, c, g, or t
  misc_feature (78)..(78): n is a, c, g, or t
  misc_feature (87)..(87): n is a, c, g, or t
  misc_feature (90)..(90): n is a, c, g, or t
  misc_feature (93)..(93): n is a, c, g, or t
  misc_feature (98)..(98): n is a, c, g, or t
  misc_feature (132)..(132): n is a, c, g, or t
  misc_feature (151)..(151): n is a, c, g, or t
  misc_feature (175)..(175): n is a, c, g, or t
  misc_feature (207)..(207): n is a, c, g, or t
  misc_feature (222)..(222): n is a, c, g, or t
  misc_feature (242)..(242): n is a, c, g, or t
  misc_feature (253)..(253): n is a, c, g, or t
  misc_feature (262)..(262): n is a, c, g, or t
  misc_feature (275)..(276): n is a, c, g, or t
  misc_feature (283)..(283): n is a, c, g, or t
  misc_feature (288)..(289): n is a, c, g, or t
  misc_feature (291)..(291): n is a, c, g, or t
  misc_feature (313)..(314): n is a, c, g, or t
  misc_feature (318)..(318): n is a, c, g, or t
  misc_feature (338)..(338): n is a, c, g, or t
  misc_feature (351)..(351): n is a, c, g, or t
  misc_feature (367)..(367): n is a, c, g, or t
  misc_feature (392)..(392): n is a, c, g, or t
  misc_feature (438)..(438): n is a, c, g, or t
  misc_feature (445)..(445): n is a, c, g, or t
  misc_feature (465)..(465): n is a, c, g, or t
  misc_feature (486)..(486): n is a, c, g, or t
  misc_feature (528)..(528): n is a, c, g, or t
  misc_feature (535)..(535): n is a, c, g, or t
  misc_feature (586)..(586): n is a, c, g, or t
  misc_feature (601)..(601): n is a, c, g, or t
  misc_feature (608)..(608): n is a, c, g, or t
  misc_feature (612)..(612): n is a, c, g, or t
  misc_feature (646)..(646): n is a, c, g, or t
  misc_feature (722)..(722): n is a, c, g, or t
  misc_feature (744)..(744): n is a, c, g, or t
  misc_feature (761)..(761): n is a, c, g, or t
  misc_feature (765)..(765): n is a, c, g, or t
  misc_feature (799)..(799): n is a, c, g, or t
  misc_feature (810)..(810): n is a, c, g, or t
  misc_feature (886)..(886): n is a, c, g, or t
  misc_feature (889)..(889): n is a, c, g, or t
  misc_feature (898)..(899): n is a, c, g, or t
  misc_feature (924)..(924): n is a, c, g, or t
  misc_feature (928)..(928): n is a, c, g, or t
ttttttttttggaaaaacgggtttaataaggggnangnatccgaacccccactcgggngaaaggaaanaaaanaatanggggggaanaanganttggnggtaatgctttaccacgacaaactagtcccattnttcggggggggaaaggganggcatgaataatggggtgaaggcnggcacccaccccattttttcgggggtaagtcngtttttttttggtanatcaaagttcctttcggaanatgtccgtttnatccaaggngttttgggtgttnnaattagnatttnngngagtttcaaaagtttgtgttcnngagnagtttgtaattggttcagcnggtttttttgtgncaggaaagcagacccntgtttgggagggagatccaattttntagttcccatttggctgtttccttagtaatgggtctgcagacagtntgaagtntatgagttggtcccttctcntatcagcccggggtggcattntgtccaaaggaggaaatccagcagccagactagatttcagtntcctttntaacagggaagttagacacacccggccagttgcagcctttccacccccaangagtgaaccctgccntttcagntttnacccaatttactttcgttggcttagcatgcagantctttggctccatgcccggagcagctgacatgggaggctttgaaacttccattatcatagaatggcaggcaggtcntttgcggttaaaaccaggagcntgggccaatgagatggntcantgagcaaaggcgcttactgccaaccctgatgccntcagtttagtnttggaattcacagggtagaagttgaaaacctttgactcttcaaaagttgtcctgtagcagggcagtggtggtgcanacntttaattgnngtacttgtgatagtcccacaaggancttngcaagtaagaagtcg

SEQ ID NO: 40 - DNA, 904 bp, Artificial Sequence
  Description of Artificial Sequence: Note: = synthetic construct
acttctctacttgccatggtccttgtggaatctttcaatctgtgtccttagaacgctaagctaagacttgaccttggctcccagggcgggctgggacttggccaccccgtgaaaagggctctttctcaggcaggtgttttcgtttaagaaaataaaccatccaagtccgggcagactgagagctacacacccctccaagccaatctggagtggctctgcccaacccccactgctgggaaaacatggctgcctcagcacctccctaaatgaagggaacagagtgtctcctgtggccttgaaaatattaataaatgagacttaacctgatggctcaaggctctcagggggcttttttttgtttttacacactctgtggagctgttacaaggtcagtcagtcatttgcatgggacagacaatctgttttaatattttatatgtttgtcttttaaaaaacctaagatctatatctttttacattttattgttttgttcaaaaaaaaaagttttacacaatgatcaaaaagttcaaatgaagtcttttttaaacctctctcctgccaaaggaaaccaagcaaactttttccagaaacctgataagaatatctcccttttaccctggaaacattaaaaataaggatccctgaattaaaaattctattccagaatcctaattttattttttattaaaaaaaaataaaacccccttaactgacgggcggtttttaaatcacctgccttcaaaacccccctggaaatttttaaaattttttttttgttccccaacattcctccccccctaataacacctgattgatacccaccaattttccactgtgggtgattgaggtggtcccccctcttttttgccgtttgatttcccccgttaaaaaatttagaaaaag

SEQ ID NO: 41 - DNA, 917 bp, Artificial Sequence
  Description of Artificial Sequence: Note: = synthetic construct
  misc_feature (9)..(9): n is a, c, g, or t
  misc_feature (19)..(19): n is a, c, g, or t
  misc_feature (24)..(24): n is a, c, g, or t
  misc_feature (45)..(45): n is a, c, g, or t
  misc_feature (61)..(61): n is a, c, g, or t
  misc_feature (63)..(63): n is a, c, g, or t
  misc_feature (78)..(78): n is a, c, g, or t
  misc_feature (80)..(80): n is a, c, g, or t
  misc_feature (100)..(100): n is a, c, g, or t
  misc_feature (104)..(104): n is a, c, g, or t
  misc_feature (114)..(114): n is a, c, g, or t
  misc_feature (123)..(123): n is a, c, g, or t
  misc_feature (147)..(147): n is a, c, g, or t
  misc_feature (159)..(159): n is a, c, g, or t
  misc_feature (199)..(200): n is a, c, g, or t
  misc_feature (206)..(206): n is a, c, g, or t
  misc_feature (211)..(211): n is a, c, g, or t
  misc_feature (215)..(215): n is a, c, g, or t
  misc_feature (224)..(224): n is a, c, g, or t
  misc_feature (230)..(230): n is a, c, g, or t
  misc_feature (232)..(232): n is a, c, g, or t
  misc_feature (243)..(243): n is a, c, g, or t
  misc_feature (260)..(260): n is a, c, g, or t
  misc_feature (289)..(289): n is a, c, g, or t
  misc_feature (294)..(294): n is a, c, g, or t
  misc_feature (304)..(304): n is a, c, g, or t
  misc_feature (317)..(317): n is a, c, g, or t
  misc_feature (333)..(333): n is a, c, g, or t
  misc_feature (338)..(338): n is a, c, g, or t
  misc_feature (366)..(366): n is a, c, g, or t
  misc_feature (371)..(371): n is a, c, g, or t
  misc_feature (387)..(387): n is a, c, g, or t
  misc_feature (402)..(402): n is a, c, g, or t
  misc_feature (404)..(404): n is a, c, g, or t
  misc_feature (412)..(412): n is a, c, g, or t
  misc_feature (431)..(431): n is a, c, g, or t
  misc_feature (439)..(439): n is a, c, g, or t
  misc_feature (446)..(446): n is a, c, g, or t
  misc_feature (488)..(488): n is a, c, g, or t
  misc_feature (498)..(498): n is a, c, g, or t
  misc_feature (548)..(548): n is a, c, g, or t
  misc_feature (558)..(559): n is a, c, g, or t
  misc_feature (561)..(561): n is a, c, g, or t
  misc_feature (564)..(564): n is a, c, g, or t
  misc_feature (567)..(567): n is a, c, g, or t
  misc_feature (586)..(586): n is a, c, g, or t
  misc_feature (602)..(603): n is a, c, g, or t
  misc_feature (606)..(606): n is a, c, g, or t
  misc_feature (618)..(618): n is a, c, g, or t
  misc_feature (621)..(621): n is a, c, g, or t
  misc_feature (642)..(642): n is a, c, g, or t
  misc_feature (645)..(645): n is a, c, g, or t
  misc_feature (652)..(652): n is a, c, g, or t
  misc_feature (660)..(660): n is a, c, g, or t
  misc_feature (670)..(670): n is a, c, g, or t
  misc_feature (682)..(682): n is a, c, g, or t
  misc_feature (688)..(688): n is a, c, g, or t
  misc_feature (697)..(697): n is a, c, g, or t
  misc_feature (712)..(712): n is a, c, g, or t
  misc_feature (723)..(724): n is a, c, g, or t
  misc_feature (726)..(726): n is a, c, g, or t
  misc_feature (738)..(738): n is a, c, g, or t
  misc_feature (761)..(761): n is a, c, g, or t
  misc_feature (767)..(767): n is a, c, g, or t
  misc_feature (770)..(770): n is a, c, g, or t
  misc_feature (793)..(793): n is a, c, g, or t
  misc_feature (816)..(816): n is a, c, g, or t
  misc_feature (819)..(819): n is a, c, g, or t
  misc_feature (869)..(869): n is a, c, g, or t
  misc_feature (878)..(879): n is a, c, g, or t
  misc_feature (882)..(882): n is a, c, g, or t
  misc_feature (885)..(885): n is a, c, g, or t
  misc_feature (890)..(890): n is a, c, g, or t
  misc_feature (898)..(898): n is a, c, g, or t
  misc_feature (902)..(902): n is a, c, g, or t
  misc_feature (904)..(904): n is a, c, g, or t
  misc_feature (914)..(914): n is a, c, g, or t
aaggggggngaaatttagnggacnaaaattattccttaagggccncctttcttcagggaanangggggaaggagatantncggcccttgtccgccttttngganacgatagggncggttcggnttggaaatttttcctccaaaattnccaacaaaaatngtttttccccttccttcaaaaagaaaattggtttttttgnnggcttnggggngtcnggaagtcanaacccngngtattattgcnttccagccccacccgtnagttcattggtaattcctattcgttcggntcaanataattcggnacttccgcttccnaatggatcccttcaangattnggtttttccggattatcgcaagtccccnggttntccaatccggagcgcntcggatatttccggntntccgtgcntttctagccccacccccangaccaccnttggttntttaggtgggtctttgatccgcttcacgttgcttcagtgacntagatccttnttcggtctttccggctcattttagtctcgagttattctcagctgtgttanaaaaaaacannanaanaanctccgcctcgcccttccgnttcggttctttccgcnngcnttcgggcgggcngtntctgccttctccacgtgacgnttnttcggcntcccagtnaccccctccntccacgccttcntccagnttcagcttntgtgctcgtcccggntgtgccgccanntngtgtcaattccngaccgcggcgggggccgggcagntggggnatntagggcgggcagacagtcggccnatctccataggccgttccctatnctnccctgatttttttaaaccatttccaaaagctcgctgtcctctttccgggncttccattnnggngtntccanaaggaagnaagncnagtaaagganctc

SEQ ID NO: 42 - DNA, 835 bp, Artificial Sequence
  Description of Artificial Sequence: Note: = synthetic construct
  misc_feature (3)..(3): n is a, c, g, or t
  misc_feature (10)..(11): n is a, c, g, or t
  misc_feature (20)..(20): n is a, c, g, or t
  misc_feature (31)..(31): n is a, c, g, or t
  misc_feature (44)..(44): n is a, c, g, or t
  misc_feature (51)..(51): n is a, c, g, or t
  misc_feature (55)..(55): n is a, c, g, or t
  misc_feature (57)..(57): n is a, c, g, or t
  misc_feature (103)..(103): n is a, c, g, or t
  misc_feature (105)..(105): n is a, c, g, or t
  misc_feature (121)..(121): n is a, c, g, or t
  misc_feature (124)..(124): n is a, c, g, or t
  misc_feature (135)..(135): n is a, c, g, or t
  misc_feature (163)..(163): n is a, c, g, or t
  misc_feature (166)..(166): n is a, c, g, or t
  misc_feature (191)..(191): n is a, c, g, or t
  misc_feature (214)..(214): n is a, c, g, or t
  misc_feature (260)..(260): n is a, c, g, or t
  misc_feature (804)..(804): n is a, c, g, or t
  misc_feature (809)..(809): n is a, c, g, or t
  misc_feature (832)..(832): n is a, c, g, or t
  misc_feature (834)..(834): n is a, c, g, or t
ggncccctanngattggccnttgatcaagangggaccatcctgnacctggnggtngntgtttccgcttgggacggagatggttgtttttgcggagtagtttcngngggtttgaggcgcggntantttttttgttntggtccagaccgttttgatttagccgcngcngacagtaatggggcgatacctcagntccttgtgaacccagggtgcagntggttcagcaggatagatgtacagcctccgaacttttcaattcccngactaaccattgatgtcaagttgagtgtttaaatgcttgctaccaagctggttggtaacctgagttcagtccctggaacccacatggggagagagaacatgcttctgtaacttgtcccctaactacccccaatacacgcatgcgcgcgcgcgcgcacacacacacacacacacacacacacacacagagagagagagagagagagagagagagagaagcacaaacaataaaagaaaaaaataaaatctcatttaattttcattagtataataccttgattctttgaatgacagcaagataaagtaaaccaaagcacactgtagaagggattacgcaactgaaaagtgacaatccttactccagcccttcctgctatgttggcagtcttgctgggagccattgatctaatcagttttatttgaggcaggggctcatgtagcccaggaggatggtcaaatccatagctcatctgaggatgagtttgaacctctgaccctcctcattctccagttctccatatcctgagtgctggcactgaaagacnccacnagtagccttggcaggctagaaangnt

SEQ ID NO: 43 - DNA, 924 bp, Artificial Sequence
  Description of Artificial Sequence: Note: = synthetic construct
  misc_feature (3)..(3): n is a, c, g, or t
  misc_feature (8)..(8): n is a, c, g, or t
  misc_feature (13)..(13): n is a, c, g, or t
  misc_feature (27)..(27): n is a, c, g, or t
  misc_feature (42)..(42): n is a, c, g, or t
  misc_feature (54)..(54): n is a, c, g, or t
  misc_feature (68)..(69): n is a, c, g, or t
  misc_feature (72)..(72): n is a, c, g, or t
  misc_feature (76)..(76): n is a, c, g, or t
  misc_feature (84)..(84): n is a, c, g, or t
  misc_feature (94)..(94): n is a, c, g, or t
  misc_feature (97)..(97): n is a, c, g, or t
  misc_feature (112)..(112): n is a, c, g, or t
  misc_feature (114)..(114): n is a, c, g, or t
  misc_feature (128)..(128): n is a, c, g, or t
  misc_feature (179)..(179): n is a, c, g, or t
  misc_feature (195)..(195): n is a, c, g, or t
  misc_feature (200)..(200): n is a, c, g, or t
  misc_feature (211)..(211): n is a, c, g, or t
  misc_feature (244)..(244): n is a, c, g, or t
  misc_feature (285)..(285): n is a, c, g, or t
  misc_feature (289)..(289): n is a, c, g, or t
  misc_feature (299)..(299): n is a, c, g, or t
  misc_feature (395)..(395): n is a, c, g, or t
  misc_feature (486)..(486): n is a, c, g, or t
  misc_feature (553)..(553): n is a, c, g, or t
  misc_feature (879)..(879): n is a, c, g, or t
  misc_feature (882)..(882): n is a, c, g, or t
  misc_feature (894)..(894): n is a, c, g, or t
  misc_feature (917)..(917): n is a, c, g, or t
gtnttttngccgngggaatttaagggngatttggagactttngaattttcgaangttccaaaatagannttnaggncaatgggnttggggcagnggngcttttttaaatcananaagtattagatttntatggaaaccctgggggttccagtttaatcccttcatcatcttgaaatatnacttgtttatgggaanggtgngatagcagccngaaacagaggtttttattattactgttagagangaggattggggaatagaacaatgagagtcttggtaatattnttcnggaaacaacngacataattggaacattaaggaaatatatccatgcattctgtacttgcaaattgctccaaggaagatggagagtattgtatttcagatagagatangactatacctgttatttttttcattatagcaacattaaaaaagatagtaatctaatttcacataaccattactactaaagtatatatgtantctttgtttatcaggttttacttctcagaaattgcagcatctcctacagagcctgtcaaatgagacngcatagatccccagagaacagagagactgggaaatcattgaaattacacaatcctatcccaaatgtttgcgtagactcaagctcgtatcagctcataagatcagtgtgtgtgtgtgtttgtgtgtgtgtgtgtcccgcacatgcttgagtatgcatgtgtgcatgcatgtgtgtatgtctattgcattagtagagatgttaaggttgaatgtattttctgctcatggtcattgtaagatattgtgctgtatgtgataagaatcaatgtaacaaggctggagagatgacttcagctgttaaaggctagactcactaccaaaaatagngcnatcagtgtgaanttccccacaggagcttagcaagntaatagg

SEQ ID NO: 44 - DNA, 435 bp, Artificial Sequence
  Description of Artificial Sequence: Note: = synthetic construct
  misc_feature (237)..(237): n is a, c, g, or t
  misc_feature (318)..(318): n is a, c, g, or t
  misc_feature (330)..(330): n is a, c, g, or t
  misc_feature (367)..(367): n is a, c, g, or t
  misc_feature (375)..(375): n is a, c, g, or t
  misc_feature (378)..(378): n is a, c, g, or t
  misc_feature (390)..(390): n is a, c, g, or t
  misc_feature (395)..(395): n is a, c, g, or t
  misc_feature (404)..(404): n is a, c, g, or t
  misc_feature (406)..(406): n is a, c, g, or t
  misc_feature (421)..(421): n is a, c, g, or t
gattccagagagaggagtgaactggcagataaggcagtcagcataatggcttagataccatgtgctttcgctcactatgcacccatgacacaagatcacagggtacaggcctggaccatggcagagtatacactggttgggtaaatgaagaggagagacagagtgggaagtcggcttagtggatatggacttcaaatttgatgaacaagcaattcaaatgagtatcgtgggcttgantggtatgaagacccgtttgcaaagcagtggtcataagagagaaaagagagagagagagagagagagagagagagagagagnaagagagagagngtgtgttgttgttgttgttgttgttgtttattggttnataacaanatntacctttgggcnctttngaaagactntncacaaaggagcttgncaagctagaaaggt

SEQ ID NO: 45 - DNA, 919 bp, Artificial Sequence
  Description of Artificial Sequence: Note: = synthetic construct
  misc_feature (5)..(5): n is a, c, g, or t
  misc_feature (13)..(13): n is a, c, g, or t
  misc_feature (16)..(16): n is a, c, g, or t
  misc_feature (23)..(24): n is a, c, g, or t
  misc_feature (36)..(36): n is a, c, g, or t
  misc_feature (40)..(43): n is a, c, g, or t
  misc_feature (57)..(58): n is a, c, g, or t
  misc_feature (74)..(74): n is a, c, g, or t
  misc_feature (76)..(76): n is a, c, g, or t
  misc_feature (83)..(83): n is a, c, g, or t
  misc_feature (97)..(97): n is a, c, g, or t
  misc_feature (101)..(101): n is a, c, g, or t
  misc_feature (125)..(125): n is a, c, g, or t
  misc_feature (142)..(142): n is a, c, g, or t
  misc_feature (152)..(152): n is a, c, g, or t
  misc_feature (166)..(166): n is a, c, g, or t
  misc_feature (177)..(177): n is a, c, g, or t
  misc_feature (179)..(179): n is a, c, g, or t
  misc_feature (181)..(181): n is a, c, g, or t
  misc_feature (184)..(184): n is a, c, g, or t
  misc_feature (211)..(211): n is a, c, g, or t
  misc_feature (219)..(220): n is a, c, g, or t
  misc_feature (226)..(226): n is a, c, g, or t
  misc_feature (228)..(228): n is a, c, g, or t
  misc_feature (231)..(231): n is a, c, g, or t
  misc_feature (241)..(241): n is a, c, g, or t
  misc_feature (244)..(244): n is a, c, g, or t
  misc_feature (249)..(249): n is a, c, g, or t
  misc_feature (260)..(260): n is a, c, g, or t
  misc_feature (271)..(271): n is a, c, g, or t
  misc_feature (274)..(274): n is a, c, g, or t
  misc_feature (280)..(280): n is a, c, g, or t
  misc_feature (291)..(292): n is a, c, g, or t
  misc_feature (298)..(298): n is a, c, g, or t
  misc_feature (307)..(307): n is a, c, g, or t
  misc_feature (314)..(315): n is a, c, g, or t
  misc_feature (331)..(331): n is a, c, g, or t
  misc_feature (335)..(335): n is a, c, g, or t
  misc_feature (342)..(342): n is a, c, g, or t
  misc_feature (358)..(358): n is a, c, g, or t
  misc_feature (360)..(360): n is a, c, g, or t
  misc_feature (399)..(399): n is a, c, g, or t
  misc_feature (421)..(421): n is a, c, g, or t
  misc_feature (437)..(437): n is a, c, g, or t
  misc_feature (439)..(439): n is a, c, g, or t
  misc_feature (452)..(452): n is a, c, g, or t
  misc_feature (476)..(476): n is a, c, g, or t
  misc_feature (524)..(524): n is a, c, g, or t
  misc_feature (528)..(528): n is a, c, g, or t
  misc_feature (532)..(532): n is a, c, g, or t
  misc_feature (536)..(536): n is a, c, g, or t
  misc_feature (541)..(541): n is a, c, g, or t
  misc_feature (547)..(548): n is a, c, g, or t
  misc_feature (550)..(550): n is a, c, g, or t
  misc_feature (553)..(553): n is a, c, g, or t
  misc_feature (561)..(561): n is a, c, g, or t
  misc_feature (617)..(617): n is a, c, g, or t
  misc_feature (634)..(634): n is a, c, g, or t
  misc_feature (663)..(663): n is a, c, g, or t
  misc_feature (754)..(754): n is a, c, g, or t
  misc_feature (855)..(855): n is a, c, g, or t
  misc_feature (868)..(868): n is a, c, g, or t
  misc_feature (880)..(880): n is a, c, g, or t
  misc_feature (882)..(883): n is a, c, g, or t
  misc_feature (885)..(886): n is a, c, g, or t
  misc_feature (894)..(894): n is a, c, g, or t
  misc_feature (898)..(899): n is a, c, g, or t
ccccngttacccngangtttacnngttggattaaangggnnnnaaaacgggtggggnnaaacgaattttttgtncncgacccntccccggttggggntggngaaataagttttaaggtgggaaanggaaaggaaataaaaanattttttttnaaggaagttccttnccacaaaaaantngnttngttcagtagggttcgggcccgggaggnaaggcaannttgaantncanttaaaaattnccnggaangtaccttgggnagggattaccntgnaatttntttaagaaaanntgggtnttttggggngattttnngccccacctggaccantttngggaaangcagaaacgttccagngngttttccttccagagagagggttaggttccttcaggggnttccaaggacggggaccagaangtgaaacaaaccaggntntgaagagaccagncgggggggggggagggggccgttntagatagattgaacctgcagagttgcctgttacctgaagttgtcaccntttnaccnacanacttnataaanntntgntgaccatntcagcaagtgtcaccttcgttgccaggacacaagtttcttaaagcttatttcagtntcacccgctggggaganacattcagggcatgggcgtcccccagccntcggggagaatgtgggaggtggcgatgtgggagggattcgagagaagagaatgcttaagaaccatccagggaacctgtgcgtttgaaggtntgagttacacacaggctgctcaggaaggagctagagctccaaataggagctgtgatcaggctgtgtgtgtgtgctggaagggccagttagcagaggttgtnttgaccacccagnctattgaattgngnntnntcccaaangganntttggcaagttaatgaagtc

SEQ ID NO: 46 - DNA, 915 bp, Artificial Sequence
  Description of Artificial Sequence: Note: = synthetic construct
  misc_feature (12)..(12): n is a, c, g, or t
  misc_feature (21)..(21): n is a, c, g, or t
  misc_feature (24)..(24): n is a, c, g, or t
  misc_feature (42)..(45): n is a, c, g, or t
  misc_feature (47)..(47): n is a, c, g, or t
  misc_feature (59)..(59): n is a, c, g, or t
  misc_feature (95)..(95): n is a, c, g, or t
  misc_feature (101)..(101): n is a, c, g, or t
  misc_feature (117)..(117): n is a, c, g, or t
  misc_feature (122)..(123): n is a, c, g, or t
  misc_feature (126)..(126): n is a, c, g, or t
  misc_feature (132)..(132): n is a, c, g, or t
  misc_feature (141)..(141): n is a, c, g, or t
  misc_feature (145)..(146): n is a, c, g, or t
  misc_feature (153)..(153): n is a, c, g, or t
  misc_feature (172)..(172): n is a, c, g, or t
  misc_feature (175)..(175): n is a, c, g, or t
  misc_feature (196)..(196): n is a, c, g, or t
  misc_feature (201)..(201): n is a, c, g, or t
  misc_feature (206)..(206): n is a, c, g, or t
  misc_feature (209)..(209): n is a, c, g, or t
  misc_feature (222)..(222): n is a, c, g, or t
  misc_feature (234)..(234): n is a, c, g, or t
  misc_feature (257)..(257): n is a, c, g, or t
  misc_feature (282)..(282): n is a, c, g, or t
  misc_feature (311)..(311): n is a, c, g, or t
  misc_feature (320)..(320): n is a, c, g, or t
  misc_feature (323)..(323): n is a, c, g, or t
  misc_feature (335)..(335): n is a, c, g, or t
  misc_feature (339)..(339): n is a, c, g, or t
  misc_feature (347)..(347): n is a, c, g, or t
  misc_feature (357)..(357): n is a, c, g, or t
  misc_feature (360)..(360): n is a, c, g, or t
  misc_feature (378)..(378): n is a, c, g, or t
  misc_feature (403)..(403): n is a, c, g, or t
  misc_feature (418)..(418): n is a, c, g, or t
  misc_feature (430)..(430): n is a, c, g, or t
  misc_feature (436)..(436): n is a, c, g, or t
  misc_feature (454)..(454): n is a, c, g, or t
  misc_feature (552)..(553): n is a, c, g, or t
  misc_feature (557)..(557): n is a, c, g, or t
  misc_feature (563)..(563): n is a, c, g, or t
  misc_feature (641)..(641): n is a, c, g, or t
  misc_feature (717)..(717): n is a, c, g, or t
  misc_feature (797)..(797): n is a, c, g, or t
  misc_feature (856)..(856): n is a, c, g, or t
  misc_feature (867)..(867): n is a, c, g, or t
  misc_feature (870)..(870): n is a, c, g, or t
  misc_feature (878)..(878): n is a, c, g, or t
  misc_feature (880)..(880): n is a, c, g, or t
  misc_feature (886)..(886): n is a, c, g, or t
  misc_feature (893)..(893): n is a, c, g, or t
  misc_feature (895)..(896): n is a, c, g, or t
  misc_feature (903)..(903): n is a, c, g, or t
  misc_feature (906)..(906): n is a, c, g, or t
  misc_feature (911)..(911): n is a, c, g, or t
ttttttggaatnttggaaccncgntttggaagaagacctttnnnntncaattggggaanaataaccggggccaaaccttgggaaggggggaaaanattccnggggggaggtaatttnttggnnggnaggggnggaggttantatnncggttgnggaagtttggaattgtccnaanggattttgtttaaaaagaggnttgcngggcntgntcccttcaaccangaggtggggccnttgcatttattttccttttaacntttgaaggtgaagccgggttatttntttgtccttcgtacatttatcaccacggngtttaaaangtntttttatttcgntttnatggaggngagttaaatntcnatttccaattaaacctcngtgaaaccttctttgatcctgcctngtgtttcctgagtgngacatacctgcntagttntggccttccctttccttntcgtccttcttccattcccttccgaagattcctgaaggagtgaaggtttgggaaagggggagggacagagtgtccagggcttgcgtgtcagtagacannaaanagccgnagggcagcccggggtgaaaccacaaggcagaggccccagggtagacagctgacaggcccgcccactttggctcctgcnttcgctgtctcaccccagaattttcctggcaggagtggaagaagttggtatcgagtctttgagccctgactcattntctgtcctagctgggtgctcctcagttacatctccaagtgtctctcaggggttcagtgttagccacatggctgcctcagntcaaaccggaaacccaagaggcggaaacatgcttcatttaattcccatctggggacccntacaaatttanggnttgtactnanggattnccacaangnnaaaggcnagntaganaggt

SEQ ID NO: 47 - DNA, 849 bp, Artificial Sequence
  Description of Artificial Sequence: Note: = synthetic construct
  misc_feature (7)..(7): n is a, c, g, or t
  misc_feature (9)..(9): n is a, c, g, or t
  misc_feature (17)..(17): n is a, c, g, or t
  misc_feature (33)..(33): n is a, c, g, or t
  misc_feature (36)..(36): n is a, c, g, or t
  misc_feature (41)..(41): n is a, c, g, or t
  misc_feature (61)..(61): n is a, c, g, or t
  misc_feature (63)..(63): n is a, c, g, or t
  misc_feature (72)..(72): n is a, c, g, or t
  misc_feature (80)..(80): n is a, c, g, or t
  misc_feature (85)..(85): n is a, c, g, or t
  misc_feature (90)..(90): n is a, c, g, or t
  misc_feature (100)..(101): n is a, c, g, or t
  misc_feature (107)..(107): n is a, c, g, or t
  misc_feature (120)..(120): n is a, c, g, or t
  misc_feature (136)..(136): n is a, c, g, or t
  misc_feature (145)..(145): n is a, c, g, or t
  misc_feature (158)..(158): n is a, c, g, or t
  misc_feature (186)..(186): n is a, c, g, or t
  misc_feature (193)..(193): n is a, c, g, or t
  misc_feature (205)..(205): n is a, c, g, or t
  misc_feature (207)..(207): n is a, c, g, or t
  misc_feature (210)..(210): n is a, c, g, or t
  misc_feature (212)..(212): n is a, c, g, or t
  misc_feature (232)..(232): n is a, c, g, or t
  misc_feature (236)..(236): n is a, c, g, or t
  misc_feature (248)..(248): n is a, c, g, or t
  misc_feature (282)..(282): n is a, c, g, or t
  misc_feature (294)..(294): n is a, c, g, or t
  misc_feature (300)..(300): n is a, c, g, or t
  misc_feature (329)..(329): n is a, c, g, or t
  misc_feature (332)..(332): n is a, c, g, or t
  misc_feature (347)..(347): n is a, c, g, or t
  misc_feature (372)..(372): n is a, c, g, or t
  misc_feature (380)..(380): n is a, c, g, or t
  misc_feature (392)..(392): n is a, c, g, or t
  misc_feature (431)..(431): n is a, c, g, or t
  misc_feature (480)..(480): n is a, c, g, or t
  misc_feature (497)..(497): n is a, c, g, or t
  misc_feature (503)..(504): n is a, c, g, or t
  misc_feature (507)..(507): n is a, c, g, or t
  misc_feature (534)..(534): n is a, c, g, or t
  misc_feature (563)..(563): n is a, c, g, or t
  misc_feature (566)..(566): n is a, c, g, or t
  misc_feature (568)..(568): n is a, c, g, or t
  misc_feature (610)..(610): n is a, c, g, or t
  misc_feature (628)..(628): n is a, c, g, or t
  misc_feature (636)..(636): n is a, c, g, or t
  misc_feature (668)..(668): n is a, c, g, or t
  misc_feature (706)..(707): n is a, c, g, or t
  misc_feature (794)..(795): n is a, c, g, or t
gttaaanangaaaaagngggggtgacagggggnganacccnttgcgccgggctatggattntnggcaccganaagatttncaggngacanggaaggtggnnggggangggggaaagtttngaggggccaaaagganaaggaggangattgattggttngggagcagtacttggaaagagtgtgttngatcggnaaacaaccacgngnagngngtttttgttgcagcagaganaagngagaaaaagatntcaggagatcttgatttttttcgggtcgagctangttgggggatgngagggnacaattcacaagatttgttcacagggagntcnaggaggtggtcccantagccggtaggggggttttctcaanaaatgggntcagtcaggtgnttgcctagatctttcattagttcctcccttcaaagggantttgaaggagtgctttgtcctgtggagcaattgactcaatcaataaacntaagtaatctcccggantactgnngangcgttcccagagaggtcccccgtagtnaccagtgaatcacaatttcctaaccatangantnttgttaatctcaccacataaacccacaattctcgcgtccttngtgatggtttcaaagtcnggaatatnttttcctccatccctcctttccttcctccttntatccctcccttccttttttcctttcacaggatctcannatgcagcccagtcaggccttaaacttgtgatcctcctgtctcagcctcctaggtgttaagatgacccaaatgtaaaccatgtccagnnacttcctcctaatcccatcttcagatatcctttaagaccaaattaaatattaac

SEQ ID NO: 48 - DNA, 925 bp, Artificial Sequence
  Description of Artificial Sequence: Note: = synthetic construct
  misc_feature (8)..(8): n is a, c, g, or t
  misc_feature (13)..(13): n is a, c, g, or t
  misc_feature (18)..(18): n is a, c, g, or t
  misc_feature (24)..(24): n is a, c, g, or t
  misc_feature (27)..(27): n is a, c, g, or t
  misc_feature (53)..(53): n is a, c, g, or t
  misc_feature (56)..(57): n is a, c, g, or t
  misc_feature (63)..(63): n is a, c, g, or t
  misc_feature (66)..(66): n is a, c, g, or t
  misc_feature (72)..(72): n is a, c, g, or t
  misc_feature (77)..(77): n is a, c, g, or t
  misc_feature (84)..(84): n is a, c, g, or t
  misc_feature (88)..(88): n is a, c, g, or t
  misc_feature (93)..(94): n is a, c, g, or t
  misc_feature (117)..(117): n is a, c, g, or t
  misc_feature (132)..(132): n is a, c, g, or t
  misc_feature (143)..(143): n is a, c, g, or t
  misc_feature (158)..(158): n is a, c, g, or t
  misc_feature (168)..(168): n is a, c, g, or t
  misc_feature (177)..(177): n is a, c, g, or t
  misc_feature (182)..(182): n is a, c, g, or t
  misc_feature (208)..(208): n is a, c, g, or t
  misc_feature (234)..(234): n is a, c, g, or t
  misc_feature (239)..(240): n is a, c, g, or t
  misc_feature (243)..(243): n is a, c, g, or t
  misc_feature (247)..(247): n is a, c, g, or t
  misc_feature (252)..(252): n is a, c, g, or t
  misc_feature (275)..(275): n is a, c, g, or t
  misc_feature (284)..(284): n is a, c, g, or t
  misc_feature (288)..(288): n is a, c, g, or t
  misc_feature (295)..(296): n is a, c, g, or t
  misc_feature (302)..(302): n is a, c, g, or t
  misc_feature (308)..(309): n is a, c, g, or t
  misc_feature (319)..(319): n is a, c, g, or t
  misc_feature (331)..(332): n is a, c, g, or t
  misc_feature (335)..(335): n is a, c, g, or t
  misc_feature (341)..(341): n is a, c, g, or t
  misc_feature (345)..(345): n is a, c, g, or t
  misc_feature (347)..(347): n is a, c, g, or t
  misc_feature (358)..(358): n is a, c, g, or t
  misc_feature (361)..(362): n is a, c, g, or t
  misc_feature (375)..(375): n is a, c, g, or t
  misc_feature (401)..(401): n is a, c, g, or t
  misc_feature (404)..(404): n is a, c, g, or t
  misc_feature (444)..(444): n is a, c, g, or t
  misc_feature (448)..(449): n is a, c, g, or t
  misc_feature (452)..(452): n is a, c, g, or t
  misc_feature (460)..(460): n is a, c, g, or t
  misc_feature (466)..(466): n is a, c, g, or t
  misc_feature (475)..(475): n is a, c, g, or t
  misc_feature (497)..(497): n is a, c, g, or t
  misc_feature (508)..(508): n is a, c, g, or t
  misc_feature (512)..(512): n is a, c, g, or t
  misc_feature (520)..(520): n is a, c, g, or t
  misc_feature (528)..(528): n is a, c, g, or t
  misc_feature (535)..(535): n is a, c, g, or t
  misc_feature (541)..(541): n is a, c, g, or t
  misc_feature (548)..(548): n is a, c, g, or t
  misc_feature (551)..(551): n is a, c, g, or t
  misc_feature (558)..(558): n is a, c, g, or t
  misc_feature (567)..(567): n is a, c, g, or t
  misc_feature (570)..(570): n is a, c, g, or t
  misc_feature (572)..(572): n is a, c, g, or t
  misc_feature (575)..(575): n is a, c, g, or t
  misc_feature (578)..(581): n is a, c, g, or t
  misc_feature (586)..(586): n is a, c, g, or t
  misc_feature (588)..(588): n is a, c, g, or t
  misc_feature (596)..(596): n is a, c, g, or t
  misc_feature (598)..(598): n is a, c, g, or t
  misc_feature (602)..(602): n is a, c, g, or t
  misc_feature (612)..(612): n is a, c, g, or t
  misc_feature (619)..(619): n is a, c, g, or t
  misc_feature (623)..(623): n is a, c, g, or t
  misc_feature (630)..(630): n is a, c, g, or t
  misc_feature (637)..(637): n is a, c, g, or t
  misc_feature (655)..(655): n is a, c, g, or t
  misc_feature (657)..(657): n is a, c, g, or t
  misc_feature (663)..(663): n is a, c, g, or t
  misc_feature (673)..(673): n is a, c, g, or t
  misc_feature (704)..(704): n is a, c, g, or t
  misc_feature (714)..(714): n is a, c, g, or t
  misc_feature (719)..(719): n is a, c, g, or t
  misc_feature (735)..(735): n is a, c, g, or t
  misc_feature (743)..(743): n is a, c, g, or t
  misc_feature (756)..(756): n is a, c, g, or t
  misc_feature (772)..(772): n is a, c, g, or t
  misc_feature (792)..(792): n is a, c, g, or t
  misc_feature (801)..(801): n is a, c, g, or t
  misc_feature (816)..(816): n is a, c, g, or t
  misc_feature (833)..(833): n is a, c, g, or t
  misc_feature (840)..(840): n is a, c, g, or t
  misc_feature (853)..(853): n is a, c, g, or t
  misc_feature (856)..(856): n is a, c, g, or t
  misc_feature (858)..(858): n is a, c, g, or t
  misc_feature (868)..(868): n is a, c, g, or t
  misc_feature (883)..(883): n is a, c, g, or t
  misc_feature (910)..(910): n is a, c, g, or t
  misc_feature (919)..(919): n is a, c, g, or t
aaaaaaanaaatnttggnggaccnaanaccaccaatgggttttggggtccgancgnncaaacntgntttcantgttnttctggntttntttgnntaaacttggggttttaagggttnaaggttccaaacccnatgttttcgcncaatttaggcggggnggggaatccntttggggangtttnagtatctagttaagaggggccatttngagattgacacctgagttaaacttcngaacnnagntgtntaatnaacccgtgaaggggctgaggggngttggttangatnctcaatnntagggnaaaaannaatgtggtanggagacagtagnntantcggancaantncgcatcggccnttnnattaataagcagncaattgaggaggttatccacgacagnganaggtgcagaccccacgcacactgtgacagtggtttatgtnacannatntcgggagngatggngccacaccnactgagttccgttttgttcggntgaaggtaggncaanactggcanaggtgttngggggcnagacgngagatgnggnttgagcnttcagaccnagntncanggnnnnggacnanggtccccngngccnttctagcctngagcagnttcnagagaantattcgncgggtataggtcgccccnangacgcnaaacgaccgngagcgagggcggaacagccaatcagttcganttatcgtgtntgttngcggggtttgatcccngagttagntcaatgagcccanaaccctgagtggaggnaccgtcatgggaggagaggngagtcaccnggtacctggcatacngatggaccatccagtanttggatnggagggcgatatngtnantcttaggggntctcctgaggagggnatacccgtgagttccgtaagggcgttngcaagtaanaagtcg

SEQ ID NO: 49 - DNA, 827 bp, Artificial Sequence
  Description of Artificial Sequence: Note: = synthetic construct
  misc_feature (19)..(19): n is a, c, g, or t
  misc_feature (22)..(22): n is a, c, g, or t
  misc_feature (32)..(32): n is a, c, g, or t
  misc_feature (38)..(38): n is a, c, g, or t
  misc_feature (44)..(44): n is a, c, g, or t
  misc_feature (57)..(57): n is a, c, g, or t
  misc_feature (83)..(83): n is a, c, g, or t
  misc_feature (115)..(115): n is a, c, g, or t
  misc_feature (120)..(120): n is a, c, g, or t
  misc_feature (132)..(132): n is a, c, g, or t
  misc_feature (137)..(137): n is a, c, g, or t
  misc_feature (147)..(147): n is a, c, g, or t
  misc_feature (166)..(166): n is a, c, g, or t
  misc_feature (179)..(179): n is a, c, g, or t
  misc_feature (194)..(194): n is a, c, g, or t
  misc_feature (196)..(196): n is a, c, g, or t
  misc_feature (202)..(202): n is a, c, g, or t
  misc_feature (208)..(208): n is a, c, g, or t
  misc_feature (211)..(211): n is a, c, g, or t
  misc_feature (218)..(218): n is a, c, g, or t
  misc_feature (220)..(221): n is a, c, g, or t
  misc_feature (233)..(234): n is a, c, g, or t
  misc_feature (236)..(236): n is a, c, g, or t
  misc_feature (240)..(240): n is a, c, g, or t
  misc_feature (242)..(242): n is a, c, g, or t
  misc_feature (246)..(247): n is a, c, g, or t
  misc_feature (254)..(254): n is a, c, g, or t
  misc_feature (259)..(260): n is a, c, g, or t
  misc_feature (270)..(271): n is a, c, g, or t
  misc_feature (273)..(273): n is a, c, g, or t
  misc_feature (279)..(280): n is a, c, g, or t
  misc_feature (286)..(286): n is a, c, g, or t
  misc_feature (299)..(299): n is a, c, g, or t
  misc_feature (304)..(304): n is a, c, g, or t
  misc_feature (308)..(308): n is a, c, g, or t
  misc_feature (321)..(323): n is a, c, g, or t
  misc_feature (330)..(330): n is a, c, g, or t
  misc_feature (333)..(333): n is a, c, g, or t
  misc_feature (337)..(338): n is a, c, g, or t
  misc_feature (340)..(341): n is a, c, g, or t
  misc_feature (358)..(358): n is a, c, g, or t
  misc_feature (369)..(369): n is a, c, g, or t
  misc_feature (377)..(377): n is a, c, g, or t
  misc_feature (402)..(402): n is a, c, g, or t
  misc_feature (427)..(427): n is a, c, g, or t
  misc_feature (433)..(433): n is a, c, g, or t
  misc_feature (438)..(438): n is a, c, g, or t
  misc_feature (475)..(475): n is a, c, g, or t
  misc_feature (478)..(478): n is a, c, g, or t
  misc_feature (493)..(494): n is a, c, g, or t
  misc_feature (502)..(502): n is a, c, g, or t
  misc_feature (519)..(519): n is a, c, g, or t
  misc_feature (523)..(523): n is a, c, g, or t
  misc_feature (532)..(533): n is a, c, g, or t
  misc_feature (539)..(539): n is a, c, g, or t
  misc_feature (544)..(544): n is a, c, g, or t
  misc_feature (554)..(555): n is a, c, g, or t
  misc_feature (572)..(572): n is a, c, g, or t
  misc_feature (577)..(577): n is a, c, g, or t
  misc_feature (583)..(583): n is a, c, g, or t
  misc_feature (586)..(586): n is a, c, g, or t
  misc_feature (601)..(601): n is a, c, g, or t
  misc_feature (603)..(603): n is a, c, g, or t
  misc_feature (606)..(606): n is a, c, g, or t
  misc_feature (608)..(608): n is a, c, g, or t
  misc_feature (629)..(629): n is a, c, g, or t
  misc_feature (643)..(643): n is a, c, g, or t
  misc_feature (657)..(658): n is a, c, g, or t
  misc_feature (668)..(668): n is a, c, g, or t
  misc_feature (670)..(670): n is a, c, g, or t
  misc_feature (681)..(681): n is a, c, g, or t
  misc_feature (683)..(684): n is a, c, g, or t
  misc_feature (687)..(687): n is a, c, g, or t
  misc_feature (689)..(689): n is a, c, g, or t
  misc_feature (704)..(705): n is a, c, g, or t
  misc_feature (709)..(709): n is a, c, g, or t
  misc_feature (721)..(721): n is a, c, g, or t
  misc_feature (725)..(725): n is a, c, g, or t
  misc_feature (732)..(732): n is a, c, g, or t
  misc_feature (741)..(741): n is a, c, g, or t
  misc_feature (747)..(747): n is a, c, g, or t
  misc_feature (764)..(764): n is a, c, g, or t
  misc_feature (766)..(766): n is a, c, g, or t
  misc_feature (779)..(779): n is a, c, g, or t
  misc_feature (789)..(789): n is a, c, g, or t
  misc_feature (792)..(792): n is a, c, g, or t
  misc_feature (810)..(810): n is a, c, g, or t
gccagttgccctcagatgnccnataccccacngggggngtctcncccctctctcaantgtacacacacttccccatagacacnggggaccatagctctagggggaaaacaaaatnttatntgtgtgtgcacntgtgngtgtgtgtgntgccccaaacacaggggtntctcttccccagnggccctaaaatgttntntgttcnccactnggncctcatntnnacataccccccnngnctcngncccnnatacccngacanngaatgtgtgnntncccatnngcgctntcaccaccacagnttttntaanacatctctccccnnnatatctnttntttnntnngggtctcaatggagacnacatatacacnagtgtgtnagacacacccccacaccccaaatgngcggggggagggctcttagcgcaangagagngcagngtgcttactcctcgccccctctagaaaactcacactnttnagatctcgggactcnncctcagcncattctctatctcccanaaanacacagagnnaccctntttgngaaaactcanntgtgtatagtgctctgngtgtnaccccnagnccacacccccataananatntntctctcaaaacatgtgcatgngcgtgtaacactcnccatctctcgggcnngctctccccntnacatctctcgngnnaananaaatatatcccctcnnttancccccgtgtccngganaatattncccccctgngaccantccctccccggagaccnancccccccgtgganaccccccccnggnatcaacccccccgggtanacaacccccggaacccc

SEQ ID NO: 50 - DNA, 899 bp, Artificial Sequence
  Description of Artificial Sequence: Note: = synthetic construct
  misc_feature (23)..(23): n is a, c, g, or t
  misc_feature (37)..(37): n is a, c, g, or t
  misc_feature (41)..(41): n is a, c, g, or t
  misc_feature (51)..(51): n is a, c, g, or t
  misc_feature (54)..(54): n is a, c, g, or t
  misc_feature (66)..(67): n is a, c, g, or t
  misc_feature (73)..(73): n is a, c, g, or t
  misc_feature (80)..(80): n is a, c, g, or t
  misc_feature (86)..(86): n is a, c, g, or t
  misc_feature (94)..(94): n is a, c, g, or t
  misc_feature (99)..(99): n is a, c, g, or t
  misc_feature (114)..(114): n is a, c, g, or t
  misc_feature (132)..(132): n is a, c, g, or t
  misc_feature (139)..(140): n is a, c, g, or t
  misc_feature (151)..(151): n is a, c, g, or t
  misc_feature (169)..(169): n is a, c, g, or t
  misc_feature (194)..(194): n is a, c, g, or t
  misc_feature (207)..(207): n is a, c, g, or t
  misc_feature (212)..(212): n is a, c, g, or t
  misc_feature (223)..(223): n is a, c, g, or t
  misc_feature (225)..(226): n is a, c, g, or t
  misc_feature (279)..(279): n is a, c, g, or t
  misc_feature (313)..(313): n is a, c, g, or t
  misc_feature (332)..(332): n is a, c, g, or t
  misc_feature (423)..(423): n is a, c, g, or t
  misc_feature (438)..(438): n is a, c, g, or t
  misc_feature (470)..(470): n is a, c, g, or t
  misc_feature (512)..(512): n is a, c, g, or t
  misc_feature (525)..(525): n is a, c, g, or t
  misc_feature (591)..(591): n is a, c, g, or t
  misc_feature (635)..(635): n is a, c, g, or t
  misc_feature (669)..(669): n is a, c, g, or t
  misc_feature (671)..(671): n is a, c, g, or t
aaaaattgtaaggagttgggggnatcccccataattnaaanagggaacaanccntaaagggagggnngggaanggccaanattggnttaaaaanagtangtttggttgatccanacacaaggaatttgttanaattttnntaatggaaatngggcacttcaattgggangataaaaccccaggaagtgataccngggttatcaagtnaaacntgattcttggngnngagggaaaggatattgaatttgagtgagtgcaggtgaagtgagacttgggagnacaggtcatgcccacccaagggaggagcaagggntgggcagtgtaggtggtgnggtggtccttcctggggtgggcggggagacagatgagaacgttattggaggacaggcacaagtgttactgaaatgcaaatccctgtagatntggaaaagttctggnttcaggcttgatgcttgggccggcaactgtgnactttccctgtacgttcagcccccccacccttacggaagttntcgtcactgagantagtggctaatcagagtcttcaatggacctgccaatcagaaaggaaggcgggcttttccgggtgcntaggtgtaggattcgctcagtagttaagcagtcttaactggttntggctgctgtgctctctgtcctgccgttggattntntgaggcatgttcaggcaagctccaaagttgcgacatggtgagcacaggggcagggggggcgggcggacgggcaggggactgagcagtgggagctggtgtggtgggtctttcccggggctgagttggaatccgcggctacccgtgaggtcttagccactcactagacccagcggcagtttctgaataactttccttgtaggggctgcaactcttgaaagaccccaccag

SEQ ID NO: 51 - DNA, 852 bp, Artificial Sequence
  Description of Artificial Sequence: Note: = synthetic construct
  misc_feature (12)..(12): n is a, c, g, or t
  misc_feature (28)..(28): n is a, c, g, or t
  misc_feature (31)..(31): n is a, c, g, or t
  misc_feature (35)..(35): n is a, c, g, or t
  misc_feature (44)..(44): n is a, c, g, or t
  misc_feature (47)..(47): n is a, c, g, or t
  misc_feature (50)..(51): n is a, c, g, or t
  misc_feature (54)..(54): n is a, c, g, or t
  misc_feature (65)..(65): n is a, c, g, or t
  misc_feature (71)..(71): n is a, c, g, or t
  misc_feature (96)..(97): n is a, c, g, or t
  misc_feature (108)..(108): n is a, c, g, or t
  misc_feature (112)..(112): n is a, c, g, or t
  misc_feature (114)..(114): n is a, c, g, or t
  misc_feature (127)..(128): n is a, c, g, or t
  misc_feature (130)..(130): n is a, c, g, or t
  misc_feature (133)..(135): n is a, c, g, or t
  misc_feature (140)..(140): n is a, c, g, or t
  misc_feature (153)..(153): n is a, c, g, or t
  misc_feature (156)..(156): n is a, c, g, or t
  misc_feature (169)..(169): n is a, c, g, or t
  misc_feature (172)..(172): n is a, c, g, or t
  misc_feature (177)..(177): n is a, c, g, or t
  misc_feature (184)..(184): n is a, c, g, or t
  misc_feature (186)..(186): n is a, c, g, or t
  misc_feature (199)..(199): n is a, c, g, or t
  misc_feature (208)..(208): n is a, c, g, or t
  misc_feature (215)..(216): n is a, c, g, or t
  misc_feature (233)..(233): n is a, c, g, or t
  misc_feature (241)..(241): n is a, c, g, or t
  misc_feature (245)..(245): n is a, c, g, or t
  misc_feature (273)..(273): n is a, c, g, or t
  misc_feature (284)..(284): n is a, c, g, or t
  misc_feature (292)..(292): n is a, c, g, or t
  misc_feature (297)..(297): n is a, c, g, or t
  misc_feature (306)..(306): n is a, c, g, or t
  misc_feature (310)..(310): n is a, c, g, or t
  misc_feature (312)..(312): n is a, c, g, or t
  misc_feature (320)..(321): n is a, c, g, or t
  misc_feature (329)..(329): n is a, c, g, or t
  misc_feature (384)..(384): n is a, c, g, or t
  misc_feature (390)..(390): n is a, c, g, or t
  misc_feature (400)..(400): n is a, c, g, or t
  misc_feature (418)..(418): n is a, c, g, or t
  misc_feature (420)..(420): n is a, c, g, or t
  misc_feature (426)..(426): n is a, c, g, or t
  misc_feature (430)..(430): n is a, c, g, or t
  misc_feature (435)..(435): n is a, c, g, or t
  misc_feature (444)..(444): n is a, c, g, or t
  misc_feature (447)..(447): n is a, c, g, or t
  misc_feature (449)..(449): n is a, c, g, or t
  misc_feature (451)..(451): n is a, c, g, or t
  misc_feature (458)..(458): n is a, c, g, or t
  misc_feature (474)..(474): n is a, c, g, or t
  misc_feature (480)..(480): n is a, c, g, or t
  misc_feature (484)..(484): n is a, c, g, or t
  misc_feature (491)..(492): n is a, c, g, or t
  misc_feature (505)..(505): n is a, c, g, or t
  misc_feature (515)..(515): n is a, c, g, or t
  misc_feature (530)..(530): n is a, c, g, or t
  misc_feature (533)..(533): n is a, c, g, or t
  misc_feature (545)..(545): n is a, c, g, or t
  misc_feature (547)..(547): n is a, c, g, or t
  misc_feature (555)..(556): n is a, c, g, or t
  misc_feature (558)..(558): n is a, c, g, or t
  misc_feature (561)..(561): n is a, c, g, or t
  misc_feature (565)..(565): n is a, c, g, or t
  misc_feature (567)..(567): n is a, c, g, or t
  misc_feature (570)..(570): n is a, c, g, or t
  misc_feature (583)..(583): n is a, c, g, or t
  misc_feature (589)..(589): n is a, c, g, or t
  misc_feature (594)..(594): n is a, c, g, or t
  misc_feature (601)..(601): n is a, c, g, or t
  misc_feature (615)..(615): n is a, c, g, or t
  misc_feature (626)..(626): n is a, c, g, or t
  misc_feature (629)..(629): n is a, c, g, or t
  misc_feature (639)..(639): n is a, c, g, or t
  misc_feature (649)..(649): n is a, c, g, or t
  misc_feature (668)..(668): n is a, c, g, or t
  misc_feature (679)..(679): n is a, c, g, or t
  misc_feature (691)..(691): n is a, c, g, or t
  misc_feature (710)..(710): n is a, c, g, or t
  misc_feature (714)..(714): n is a, c, g, or t
  misc_feature (716)..(716): n is a, c, g, or t
  misc_feature (734)..(734): n is a, c, g, or t
  misc_feature (757)..(757): n is a, c, g, or t
  misc_feature (761)..(761): n is a, c, g, or t
  misc_feature (765)..(765): n is a, c, g, or t
  misc_feature (770)..(772): n is a, c, g, or t
  misc_feature (778)..(778): n is a, c, g, or t
  misc_feature (787)..(787): n is a, c, g, or t
  misc_feature (789)..(789): n is a, c, g, or t
  misc_feature (824)..(824): n is a, c, g, or t
  misc_feature (831)..(831): n is a, c, g, or t
  misc_feature (834)..(834): n is a, c, g, or t
aaaacattggcnagacttgtaataattnccngttnggggaaaanagnggnntgngcttcgggggngggganccgaggttccccccaaatttcttannaattgaggganattnanggggggaaccganngntcnnnaaggnggggtttttcccnttngcccccttggggnttnacaanttgaccntnagttaacgggganaacccgccntgtcctnngggaggggggttccctngggagttncgtngtgggtttcagttcggaccaggtcgttnactcgaaaacnggtccgcngtatncacccggtnggcngnctgttganngctaacgnggtaagtattttcatgtgtccgaacgtgttagactccaagtatggccatgtgcangaaccnccggttagcnagacgcagagcgtgatcngnggaggntctncaggngtccaaccnggnangncaagatncgtcgacactggcagnacccantggngactggnngatcagagggagncaggtacgcngggaaacagagttgntgnattggatccggnanacggacanncnagngggncngtngtttggtatgtgngctagnaggangccaggnacagtcggaaaggntgtcgggaggntcngatcatgtcntacataaccnctcgtgagtatgcggtggntgtggagttgngcaggcggcagntaacgcaccagagaattcngatntntccgcagatcgacagatntgttaggtgggtctctgacgttnaggncganaggannngggagnggataacantntcacacagaatttcactgaggctgaaagaccccanttgtaantgnccaagctagctgaaatcg

SEQ ID NO: 52 - DNA, 967 bp, Artificial Sequence
  Description of Artificial Sequence: Note: = synthetic construct
  misc_feature (4)..(4): n is a, c, g, or t
  misc_feature (14)..(14): n is a, c, g, or t
  misc_feature (25)..(25): n is a, c, g, or t
  misc_feature (32)..(32): n is a, c, g, or t
  misc_feature (43)..(43): n is a, c, g, or t
  misc_feature (50)..(50): n is a, c, g, or t
  misc_feature (55)..(56): n is a, c, g, or t
  misc_feature (59)..(59): n is a, c, g, or t
  misc_feature (100)..(100): n is a, c, g, or t
  misc_feature (107)..(108): n is a, c, g, or t
  misc_feature (115)..(115): n is a, c, g, or t
  misc_feature (117)..(117): n is a, c, g, or t
  misc_feature (126)..(126): n is a, c, g, or t
  misc_feature (131)..(131): n is a, c, g, or t
  misc_feature (137)..(137): n is a, c, g, or t
  misc_feature (141)..(141): n is a, c, g, or t
  misc_feature (150)..(150): n is a, c, g, or t
  misc_feature (159)..(159): n is a, c, g, or t
  misc_feature (169)..(169): n is a, c, g, or t
  misc_feature (174)..(175): n is a, c, g, or t
  misc_feature (178)..(178): n is a, c, g, or t
  misc_feature (181)..(181): n is a, c, g, or t
  misc_feature (189)..(189): n is a, c, g, or t
  misc_feature (200)..(200): n is a, c, g, or t
  misc_feature (216)..(216): n is a, c, g, or t
  misc_feature (222)..(222): n is a, c, g, or t
  misc_feature (225)..(225): n is a, c, g, or t
  misc_feature (238)..(238): n is a, c, g, or t
  misc_feature (258)..(258): n is a, c, g, or t
  misc_feature (261)..(261): n is a, c, g, or t
  misc_feature (272)..(272): n is a, c, g, or t
  misc_feature (301)..(301): n is a, c, g, or t
  misc_feature (303)..(304): n is a, c, g, or t
  misc_feature (312)..(312): n is a, c, g, or t
  misc_feature (314)..(314): n is a, c, g, or t
  misc_feature (317)..(317): n is a, c, g, or t
  misc_feature (330)..(330): n is a, c, g, or t
  misc_feature (346)..(346): n is a, c, g, or t
  misc_feature (352)..(352): n is a, c, g, or t
  misc_feature (363)..(363): n is a, c, g, or t
  misc_feature (380)..(380): n is a, c, g, or t
  misc_feature (382)..(382): n is a, c, g, or t
  misc_feature (417)..(417): n is a, c, g, or t
  misc_feature (421)..(421): n is a, c, g, or t
  misc_feature (462)..(462): n is a, c, g, or t
  misc_feature (468)..(468): n is a, c, g, or t
  misc_feature (475)..(475): n is a, c, g, or t
  misc_feature (479)..(479): n is a, c, g, or t
  misc_feature (481)..(481): n is a, c, g, or t
  misc_feature (515)..(515): n is a, c, g, or t
  misc_feature (541)..(541): n is a, c, g, or t
  misc_feature (543)..(543): n is a, c, g, or t
  misc_feature (598)..(598): n is a, c, g, or t
  misc_feature (600)..(600): n is a, c, g, or t
  misc_feature (607)..(608): n is a, c, g, or t
  misc_feature (615)..(615): n is a, c, g, or t
  misc_feature (620)..(620): n is a, c, g, or t
  misc_feature (650)..(650): n is a, c, g, or t
  misc_feature (661)..(661): n is a, c, g, or t
  misc_feature (723)..(723): n is a, c, g, or t
  misc_feature (812)..(812): n is a, c, g, or t
  misc_feature (920)..(920): n is a, c, g, or t
  misc_feature (932)..(932): n is a, c, g, or t
  misc_feature (945)..(945): n is a, c, g, or t
  misc_feature (948)..(948): n is a, c, g, or t
  misc_feature (965)..(965): n is a, c, g, or t
aaanccttcccggnggggttaaaanagattangggttttccgnggggaanccccnnccnccgccttcgtaatttgtccccaagaaaaattcccgcgcccncaaaaannaggggantnggggaaatnttagnggccanaagnaaaaaaganaattgtttngttttggagnccacnncgnaanagggggtnttaaacgcaanaacaccgggggggggntttttnttncaacgcgaaaaangcggaaaaagatttcagganacntgaattttttngggtcgaagttcagtggggggattggggngnnaaaatttnanacngattattggtccnacctttctccttcccntccctnccaaaattttntccaattttcttctttntntccatttccccaccaggagggagtcacccaccttntgcngcaacattctcagggttcttcattctcagtgtaacagcagntcttcnggttctngggnantcagaaactgggctgaatcatgtccagagttgcngagttcccacataacagatagtgttngngagattctcagtctagaaccatgtgagccaatccccatcaaatctcttctctcangnataaatnnaaacatncttangggaggctctatttctatggagaaaccagnacccatatttngggctggatcactctttatttccattatgggatgtttaacagtaatcctggtctgcattccntaggtgccagtagccatctcctagttgtgacaatcatcattttctggggatgagggtggagaagggggcagatatcaaaactatcctgnatctaagaaatgttagttgaaatgaagttgtcatgggtcataaagtctaggataaagagtgatgagatgtcactaacccaactcttttggccagaactcaatgaggtngtcccatttganttaccccaaaggngcnttagcaagtaaaagggncg

SEQ ID NO: 53 - DNA, 700 bp, Artificial Sequence
  Description of Artificial Sequence: Note: = synthetic construct
  misc_feature (3)..(3): n is a, c, g, or t
  misc_feature (75)..(75): n is a, c, g, or t
  misc_feature (201)..(201): n is a, c, g, or t
  misc_feature (208)..(208): n is a, c, g, or t
  misc_feature (225)..(225): n is a, c, g, or t
  misc_feature (250)..(250): n is a, c, g, or t
  misc_feature (277)..(277): n is a, c, g, or t
  misc_feature (288)..(288): n is a, c, g, or t
  misc_feature (321)..(321): n is a, c, g, or t
  misc_feature (336)..(336): n is a, c, g, or t
  misc_feature (345)..(345): n is a, c, g, or t
  misc_feature (363)..(363): n is a, c, g, or t
  misc_feature (368)..(368): n is a, c, g, or t
  misc_feature (370)..(370): n is a, c, g, or t
  misc_feature (379)..(379): n is a, c, g, or t
  misc_feature (385)..(385): n is a, c, g, or t
  misc_feature (390)..(390): n is a, c, g, or t
  misc_feature (393)..(393): n is a, c, g, or t
  misc_feature (409)..(409): n is a, c, g, or t
  misc_feature (413)..(413): n is a, c, g, or t
  misc_feature (416)..(416): n is a, c, g, or t
  misc_feature (431)..(432): n is a, c, g, or t
  misc_feature (436)..(440): n is a, c, g, or t
  misc_feature (443)..(443): n is a, c, g, or t
  misc_feature (446)..(446): n is a, c, g, or t
  misc_feature (449)..(449): n is a, c, g, or t
  misc_feature (470)..(470): n is a, c, g, or t
  misc_feature (481)..(481): n is a, c, g, or t
  misc_feature (483)..(483): n is a, c, g, or t
  misc_feature (486)..(487): n is a, c, g, or t
  misc_feature (499)..(499): n is a, c, g, or t
  misc_feature (501)..(501): n is a, c, g, or t
  misc_feature (508)..(508): n is a, c, g, or t
  misc_feature (512)..(512): n is a, c, g, or t
  misc_feature (523)..(524): n is a, c, g, or t
  misc_feature (533)..(533): n is a, c, g, or t
  misc_feature (552)..(552): n is a, c, g, or t
  misc_feature (559)..(559): n is a, c, g, or t
  misc_feature (567)..(567): n is a, c, g, or t
  misc_feature (575)..(575): n is a, c, g, or t
  misc_feature (577)..(577): n is a, c, g, or t
  misc_feature (583)..(583): n is a, c, g, or t
  misc_feature (585)..(585): n is a, c, g, or t
  misc_feature (601)..(602): n is a, c, g, or t
  misc_feature (610)..(610): n is a, c, g, or t
  misc_feature (612)..(612): n is a, c, g, or t
  misc_feature (614)..(615): n is a, c, g, or t
  misc_feature (617)..(617): n is a, c, g, or t
  misc_feature (621)..(621): n is a, c, g, or t
  misc_feature (623)..(623): n is a, c, g, or t
  misc_feature (627)..(628): n is a, c, g, or t
  misc_feature (638)..(638): n is a, c, g, or t
  misc_feature (652)..(652): n is a, c, g, or t
  misc_feature (656)..(656): n is a, c, g, or t
  misc_feature (658)..(658): n is a, c, g, or t
  misc_feature (660)..(660): n is a, c, g, or t
  misc_feature (662)..(662): n is a, c, g, or t
  misc_feature (668)..(668): n is a, c, g, or t
  misc_feature (671)..(671): n is a, c, g, or t
  misc_feature (680)..(680): n is a, c, g, or t
  misc_feature (689)..(689): n is a, c, g, or t
  misc_feature (696)..(696): n is a, c, g, or t
ggngtgctgggattatagatgcactcccccaaatccagctttttacctgataccggaggaaggaacggaagtccnccggcttgcaccggaagcagtttcacccactgagccatctccctggtctgtctgtctcagcttcctgagctggtgttatggctgtgcaccaccatagctggcttctttattatttatgtatgactngggtctntctgggggtctgttagncagtctgttaactaccatcttttgnctcaggcagctgcaacagaaaacaacnggctgtaaatngttttgacaaatgggtctggggagaagtctgtnatgcagggagatctngagtttatncagaggaaaaggtgtctntcagngnatctagggnagcatntcctntcngcgtcttggtttgggngaanganggatcaagagccccnnagcnnnnnaanttnccntcgagcagcccagggattttngctttcaacgnanctnnagggaacccccnancaacctnggcnacaattggggnntttcccccnccccccccgattacttttncaaaccnttgccacnccctcgcncnatgccnancccccaaaacgtcgtnnttcataancncnncnctcncncttnncccatggggngcacactcccttcncccncntntnttaacnggnggcgcaagncctttcttnccccctncccc

SEQ ID NO: 54 - DNA, 229 bp, Artificial Sequence
  Description of Artificial Sequence: Note: = synthetic construct
  misc_feature (1)..(1): n is a, c, g, or t
  misc_feature (3)..(3): n is a, c, g, or t
  misc_feature (10)..(10): n is a, c, g, or t
  misc_feature (16)..(16): n is a, c, g, or t
  misc_feature (20)..(20): n is a, c, g, or t
  misc_feature (23)..(23): n is a, c, g, or t
  misc_feature (27)..(27): n is a, c, g, or t
  misc_feature (35)..(35): n is a, c, g, or t
  misc_feature (40)..(40): n is a, c, g, or t
  misc_feature (47)..(47): n is a, c, g, or t
  misc_feature (57)..(57): n is a, c, g, or t
  misc_feature (61)..(61): n is a, c, g, or t
  misc_feature (75)..(75): n is a, c, g, or t
  misc_feature (80)..(80): n is a, c, g, or t
  misc_feature (90)..(90): n is a, c, g, or t
  misc_feature (102)..(102): n is a, c, g, or t
  misc_feature (104)..(104): n is a, c, g, or t
  misc_feature (117)..(117): n is a, c, g, or t
  misc_feature (121)..(121): n is a, c, g, or t
  misc_feature (125)..(125): n is a, c, g, or t
  misc_feature (127)..(127): n is a, c, g, or t
  misc_feature (131)..(131): n is a, c, g, or t
  misc_feature (145)..(145): n is a, c, g, or t
  misc_feature (149)..(149): n is a, c, g, or t
  misc_feature (159)..(159): n is a, c, g, or t
  misc_feature (167)..(168): n is a, c, g, or t
  misc_feature (174)..(175): n is a, c, g, or t
  misc_feature (181)..(181): n is a, c, g, or t
  misc_feature (184)..(186): n is a, c, g, or t
  misc_feature (190)..(190): n is a, c, g, or t
  misc_feature (192)..(192): n is a, c, g, or t
  misc_feature (194)..(194): n is a, c, g, or t
  misc_feature (200)..(200): n is a, c, g, or t
  misc_feature (203)..(203): n is a, c, g, or t
  misc_feature (221)..(221): n is a, c, g, or t
  misc_feature (225)..(225): n is a, c, g, or t
  misc_feature (228)..(228): n is a, c, g, or t
ncnacgagangtcaangtgnaanctgncgatgatnaaaanaaccgancttagggtgncaangggttacccagganggggncaaagcaagntccaggcccatnanggacctgctggtncatngccngnaaanacctacttatcctngaanagcccgaaangtccgctnngaccanntaagtncannncaanangnaccacnccnttaacaccaccgtatgancccnaant

SEQ ID NO: 55 - DNA, 465 bp, Artificial Sequence
  Description of Artificial Sequence: Note: = synthetic construct
  misc_feature (10)..(11): n is a, c, g, or t
  misc_feature (21)..(21): n is a, c, g, or t
  misc_feature (23)..(23): n is a, c, g, or t
  misc_feature (25)..(25): n is a, c, g, or t
  misc_feature (30)..(30): n is a, c, g, or t
  misc_feature (37)..(37): n is a, c, g, or t
  misc_feature (39)..(39): n is a, c, g, or t
  misc_feature (51)..(52): n is a, c, g, or t
  misc_feature (69)..(69): n is a, c, g, or t
  misc_feature (107)..(108): n is a, c, g, or t
  misc_feature (112)..(112): n is a, c, g, or t
  misc_feature (175)..(175): n is a, c, g, or t
  misc_feature (222)..(222): n is a, c, g, or t
  misc_feature (255)..(255): n is a, c, g, or t
  misc_feature (261)..(261): n is a, c, g, or t
  misc_feature (287)..(287): n is a, c, g, or t
  misc_feature (303)..(303): n is a, c, g, or t
  misc_feature (311)..(311): n is a, c, g, or t
  misc_feature (323)..(323): n is a, c, g, or t
  misc_feature (325)..(325): n is a, c, g, or t
  misc_feature (334)..(334): n is a, c, g, or t
  misc_feature (374)..(374): n is a, c, g, or t
  misc_feature (376)..(376): n is a, c, g, or t
  misc_feature (393)..(394): n is a, c, g, or t
  misc_feature (398)..(398): n is a, c, g, or t
  misc_feature (415)..(415): n is a, c, g, or t
  misc_feature (426)..(426): n is a, c, g, or t
  misc_feature (435)..(435): n is a, c, g, or t
  misc_feature (441)..(441): n is a, c, g, or t
  misc_feature (448)..(451): n is a, c, g, or t
  misc_feature (464)..(464): n is a, c, g, or t
cccctttcgnnggcctcaatnantnattgnctacccnanagtggcggtctnncatcatgacaaataaancagccttcatgaaatacgatggcggggggattagaggnntttnttgaaagagctgaaggggcttgcaaccccataagaacaacaatgccaaccacccagagcttcnagggcattaaaacactactgaaagactatacatggactgaccctggnctccaactgcatatgtagcagagcaagagcctngttggngcaccagtggaaggggaagcccttgntcctgccaaggttggnctcccagnccaggggtaatntngggggcggnggagcagtaagggagggtggatggcggggctacccatatngngtggcggaggagatcgnngctnatggacaggaaactggnaaacgggaatnacattgganatctcnataaagnnnncatttcttattcna

SEQ ID NO: 56 - DNA, 564 bp, Artificial Sequence
  Description of Artificial Sequence: Note: = synthetic construct
  misc_feature (10)..(10): n is a, c, g, or t
  misc_feature (12)..(12): n is a, c, g, or t
  misc_feature (20)..(20): n is a, c, g, or t
  misc_feature (23)..(25): n is a, c, g, or t
  misc_feature (31)..(31): n is a, c, g, or t
  misc_feature (35)..(35): n is a, c, g, or t
  misc_feature (37)..(37): n is a, c, g, or t
  misc_feature (53)..(53): n is a, c, g, or t
  misc_feature (60)..(60): n is a, c, g, or t
  misc_feature (65)..(65): n is a, c, g, or t
  misc_feature (69)..(69): n is a, c, g, or t
  misc_feature (72)..(72): n is a, c, g, or t
  misc_feature (76)..(76): n is a, c, g, or t
  misc_feature (81)..(81): n is a, c, g, or t
  misc_feature (85)..(85): n is a, c, g, or t
  misc_feature (87)..(87): n is a, c, g, or t
  misc_feature (103)..(103): n is a, c, g, or t
  misc_feature (106)..(106): n is a, c, g, or t
  misc_feature (115)..(115): n is a, c, g, or t
  misc_feature (125)..(125): n is a, c, g, or t
  misc_feature (138)..(138): n is a, c, g, or t
  misc_feature (141)..(141): n is a, c, g, or t
  misc_feature (144)..(144): n is a, c, g, or t
  misc_feature (158)..(158): n is a, c, g, or t
  misc_feature (164)..(164): n is a, c, g, or t
  misc_feature (190)..(190): n is a, c, g, or t
  misc_feature (192)..(192): n is a, c, g, or t
  misc_feature (195)..(195): n is a, c, g, or t
  misc_feature (203)..(203): n is a, c, g, or t
  misc_feature (212)..(212): n is a, c, g, or t
  misc_feature (219)..(219): n is a, c, g, or t
  misc_feature (225)..(225): n is a, c, g, or t
  misc_feature (248)..(248): n is a, c, g, or t
  misc_feature (256)..(257): n is a, c, g, or t
  misc_feature (262)..(262): n is a, c, g, or t
  misc_feature (272)..(272): n is a, c, g, or t
  misc_feature (275)..(275): n is a, c, g, or t
  misc_feature (278)..(278): n is a, c, g, or t
  misc_feature (288)..(288): n is a, c, g, or t
  misc_feature (297)..(297): n is a, c, g, or t
  misc_feature (304)..(304): n is a, c, g, or t
  misc_feature (311)..(311): n is a, c, g, or t
  misc_feature (314)..(315): n is a, c, g, or t
  misc_feature (344)..(344): n is a, c, g, or t
  misc_feature (350)..(350): n is a, c, g, or t
  misc_feature (352)..(352): n is a, c, g, or t
  misc_feature (365)..(366): n is a, c, g, or t
  misc_feature (368)..(368): n is a, c, g, or t
  misc_feature (370)..(370): n is a, c, g, or t
  misc_feature (378)..(378): n is a, c, g, or t
  misc_feature (390)..(390): n is a, c, g, or t
  misc_feature (403)..(403): n is a, c, g, or t
  misc_feature (424)..(424): n is a, c, g, or t
  misc_feature (450)..(451): n is a, c, g, or t
  misc_feature (457)..(457): n is a, c, g, or t
  misc_feature (470)..(470): n is a, c, g, or t
  misc_feature (478)..(478): n is a, c, g, or t
  misc_feature (490)..(490): n is a, c, g, or t
  misc_feature (493)..(493): n is a, c, g, or t
  misc_feature (498)..(498): n is a, c, g, or t
  misc_feature (504)..(504): n is a, c, g, or t
  misc_feature (507)..(507): n is a, c, g, or t
  misc_feature (511)..(511): n is a, c, g, or t
  misc_feature (517)..(517): n is a, c, g, or t
  misc_feature (534)..(534): n is a, c, g, or t
  misc_feature (540)..(540): n is a, c, g, or t
  misc_feature (543)..(544): n is a, c, g, or t
ttggggccgntnaactctgngtnnnagtatncccnanagggggggtctcacancgggtcncaccncatntgngggngcccnttcncnacaacacattttgtcnggnggttatagngagagcacanattttgagagtcnccnganaggggagagagacncacacnagtctcttctccccgtgttcgcgagngnacncttctctncacatctanagtatancccagngtcacatatgtggcgggggggtngtgtcagnnacagngtttcccccnccngtntttccccctnccccccccncaggggnagacaangtnntagagagaacaggggttatccacacatcncactgngnggcacaggaggannananttgtgctnagagcccctgcncttctggtggtanctctggggcccatattctctnctctgggtcccccccgggggggtgtnnccctcnccgggagagagtnttagaganaaatctccatcncanatganaaaatntgngggngagaancccgggggatatcactnttttanaanngaccccacccccccccccct

SEQ ID NO: 57 - DNA, 822 bp, Artificial Sequence
  Description of Artificial Sequence: Note: = synthetic construct
  misc_feature (8)..(8): n is a, c, g, or t
  misc_feature (16)..(16): n is a, c, g, or t
  misc_feature (19)..(19): n is a, c, g, or t
  misc_feature (32)..(32): n is a, c, g, or t
  misc_feature (36)..(36): n is a, c, g, or t
  misc_feature (51)..(51): n is a, c, g, or t
  misc_feature (55)..(55): n is a, c, g, or t
  misc_feature (66)..(66): n is a, c, g, or t
  misc_feature (79)..(80): n is a, c, g, or t
  misc_feature (82)..(82): n is a, c, g, or t
  misc_feature (93)..(93): n is a, c, g, or t
  misc_feature (109)..(111): n is a, c, g, or t
  misc_feature (113)..(113): n is a, c, g, or t
  misc_feature (120)..(120): n is a, c, g, or t
  misc_feature (137)..(137): n is a, c, g, or t
  misc_feature (144)..(144): n is a, c, g, or t
  misc_feature (147)..(147): n is a, c, g, or t
  misc_feature (149)..(149): n is a, c, g, or t
  misc_feature (151)..(151): n is a, c, g, or t
  misc_feature (165)..(165): n is a, c, g, or t
  misc_feature (187)..(187): n is a, c, g, or t
  misc_feature (198)..(198): n is a, c, g, or t
  misc_feature (204)..(204): n is a, c, g, or t
  misc_feature (220)..(220): n is a, c, g, or t
  misc_feature (229)..(229): n is a, c, g, or t
  misc_feature (234)..(235): n is a, c, g, or t
  misc_feature (249)..(249): n is a, c, g, or t
  misc_feature (251)..(252): n is a, c, g, or t
  misc_feature (266)..(266): n is a, c, g, or t
  misc_feature (277)..(277): n is a, c, g, or t
  misc_feature (298)..(298): n is a, c, g, or t
  misc_feature (301)..(301): n is a, c, g, or t
  misc_feature (306)..(306): n is a, c, g, or t
  misc_feature (318)..(318): n is a, c, g, or t
  misc_feature (324)..(327): n is a, c, g, or t
  misc_feature (329)..(329): n is a, c, g, or t
  misc_feature (338)..(338): n is a, c, g, or t
  misc_feature (356)..(357): n is a, c, g, or t
  misc_feature (367)..(367): n is a, c, g, or t
  misc_feature (371)..(371): n is a, c, g, or t
  misc_feature (376)..(376): n is a, c, g, or t
  misc_feature (388)..(388): n is a, c, g, or t
  misc_feature (395)..(395): n is a, c, g, or t
  misc_feature (402)..(402): n is a, c, g, or t
  misc_feature (410)..(411): n is a, c, g, or t
  misc_feature (419)..(419): n is a, c, g, or t
  misc_feature (433)..(433): n is a, c, g, or t
  misc_feature (435)..(437): n is a, c, g, or t
  misc_feature (441)..(441): n is a, c, g, or t
  misc_feature (455)..(455): n is a, c, g, or t
  misc_feature (457)..(457): n is a, c, g, or t
  misc_feature (460)..(460): n is a, c, g, or t
  misc_feature (464)..(464): n is a, c, g, or t
  misc_feature (468)..(468): n is a, c, g, or t
  misc_feature (472)..(472): n is a, c, g, or t
  misc_feature (504)..(504): n is a, c, g, or t
  misc_feature (510)..(510): n is a, c, g, or t
  misc_feature (512)..(512): n is a, c, g, or t
  misc_feature (531)..(531): n is a, c, g, or t
  misc_feature (539)..(539): n is a, c, g, or t
  misc_feature (543)..(543): n is a, c, g, or t
  misc_feature (568)..(568): n is a, c, g, or t
  misc_feature (570)..(570): n is a, c, g, or t
  misc_feature (596)..(596): n is a, c, g, or t
  misc_feature (602)..(603): n is a, c, g, or t
  misc_feature (608)..(608): n is a, c, g, or t
  misc_feature (620)..(620): n is a, c, g, or t
  misc_feature (630)..(631): n is a, c, g, or t
  misc_feature (634)..(634): n is a, c, g, or t
  misc_feature (640)..(640): n is a, c, g, or t
  misc_feature (643)..(643): n is a, c, g, or t
  misc_feature (658)..(658): n is a, c, g, or t
  misc_feature (662)..(662): n is a, c, g, or t
  misc_feature (665)..(665): n is a, c, g, or t
  misc_feature (668)..(668): n is a, c, g, or t
  misc_feature (672)..(672): n is a, c, g, or t
  misc_feature (674)..(674): n is a, c, g, or t
  misc_feature (678)..(678): n is a, c, g, or t
  misc_feature (685)..(686): n is a, c, g, or t
  misc_feature (692)..(692): n is a, c, g, or t
  misc_feature (711)..(711): n is a, c, g, or t
  misc_feature (718)..(718): n is a, c, g, or t
  misc_feature (732)..(732): n is a, c, g, or t
  misc_feature (736)..(737): n is a, c, g, or t
  misc_feature (746)..(746): n is a, c, g, or t
  misc_feature (783)..(783): n is a, c, g, or t
  misc_feature (792)..(792): n is a, c, g, or t
  misc_feature (795)..(795): n is a, c, g, or t
  misc_feature (797)..(797): n is a, c, g, or t
  misc_feature (799)..(799): n is a, c, g, or t
  misc_feature (802)..(802): n is a, c, g, or t
  misc_feature (808)..(808): n is a, c, g, or t
gatttgcnctcatatntcntttaccaaacagngggngtctgcccccctgtnatanacctcttgttntcgcggggtgctnntnggggccccccntgtagaaaaagaacannngntgtgggngggggatttctctctgntgtaganctntncnctgagacacacagngccctgtgtggggtccccctcnccgaaaaaganaccccnaaaaaaaaaaaaaaanagaccgcgnggggnngaaaaatatctctngnnatcttctctctaanctcgcttttantcctcagaaaaccccaccccnccnctctncccagaaatatnatacannnngngttcccctncccaaaaccccaaagggnntcccctctcntctnccccnaatactcttccnccccttnattctcntatctctnnggactcanactctaaaacacangnnncttntctgtgccgcaatntnttntgtnacanggcnccctgaaaaaaacccccgtgttctccacatcncctctntnatatctctgcccccttccnctatatcnctgngtttataatttccaaggagaatgtncncaggggggccccaatctccccccctngtttcnncgagnagggctcttttntatatttttnntcnaaaccnccnttgtccttttaaatnggcnttnacncccngncccncccaacnncccgancgggggaaacgttccccanttttccntttccccccgcccncccnnaccccaatncccttttttcgcgttccgggggccctgtttccctaancccggaatnaantncnttnttcaancccccccctttttt

SEQ ID NO: 58 - DNA, 553 bp, Artificial Sequence
  Description of Artificial Sequence: Note: = synthetic construct
tttgggtgcggtctcctctgtgttagtgtatcccccatagggggggtctcacagggagcccttctcttttggggggttatacacaggggacacacatgtgatatagagagaacacatgagagtgggagagtgggggggtgggtggaagtgagaaacagagagagagagactttattttttgtggtgtaaaatgtgttgaatctctggtttgataaattttacacattggggtttgtgtagatccctgatctctctcctatccccattctctttcagagatgtgtctctggattctcagagagattttctggtctcacatgtttggtcccttatgttctcactctctcttctttattctctgatacatgtgctcttcccccttgggtcttctctctgtctctgtctccccccccatgatacatagagtgtgttttctccccggggtttcccttgttcacaagaagagctctggggaatctctatcttctcaagggtatagccccccagtccccaggccctttttcttggaattttggagggggttccccatttt

SEQ ID NO: 59 - DNA, 904 bp, Artificial Sequence
  Description of Artificial Sequence: Note = Synthetic Construct
gggatttgctctcagatggtagtttacgtaaactgtgggtgtcttgcctctctctcaaaacatgtgcgcgtttctgggcccgtgcgcgttttctgtgctcctccttcttcacttctttgtcgcgggggcgctcgcccctgtgttttctgtgctcctcggggagatgctctcccttggggctgtggggctctgtggcggtggtggcggtgtcctcgataccgtgcttttttgttttctcgagatcttactttttcctctcccccttgtgtgtttcttgggtatacacgagattgtgtgtgtctcttttcttaccccctctctagtttatattcacacttactctctctcttttctttttctctttagattctatcctttgtgcactttttctattgtgctctagatttctcccctttttgtttatttctcttctccctgtgtccagtgtggtgaaaaagacccttattaaatttagacttgtgcgctctcttcttaaatttcatgtgttctacagtctctctgcgctttagatatttttagaagcgcctaaatcttttaaaaacgtgtgagatctcttttttttttttacactcctttgttttttcttactcctcaggggcatataaacccccctctcctttaatatttctcactctctttcttttcaaaaaaatttttcaatctaaatccaaatttttttttttttttggtggcccctaatttttgggaacggcccccccccctcctctgggccctcattggggggatttttttaattcccgtaaataaaaagggtcgggcccttctccccccgtggggtaattaatcaaggattttagggttggtaaaaatttcgggttttgatggttttgccccccccttaacccctctttttttttttttt

SEQ ID NO: 60 - DNA, 698 bp, Artificial Sequence
  Description of Artificial Sequence: Note: = synthetic construct
  misc_feature (210)..(210): n is a, c, g, or t
  misc_feature (229)..(229): n is a, c, g, or t
  misc_feature (259)..(259): n is a, c, g, or t
  misc_feature (306)..(306): n is a, c, g, or t
  misc_feature (316)..(316): n is a, c, g, or t
  misc_feature (401)..(401): n is a, c, g, or t
  misc_feature (435)..(435): n is a, c, g, or t
  misc_feature (437)..(437): n is a, c, g, or t
  misc_feature (477)..(477): n is a, c, g, or t
  misc_feature (481)..(481): n is a, c, g, or t
  misc_feature (493)..(493): n is a, c, g, or t
  misc_feature (519)..(519): n is a, c, g, or t
  misc_feature (526)..(526): n is a, c, g, or t
  misc_feature (533)..(533): n is a, c, g, or t
  misc_feature (545)..(545): n is a, c, g, or t
  misc_feature (547)..(547): n is a, c, g, or t
  misc_feature (554)..(554): n is a, c, g, or t
  misc_feature (565)..(565): n is a, c, g, or t
  misc_feature (570)..(570): n is a, c, g, or t
  misc_feature (577)..(578): n is a, c, g, or t
  misc_feature (584)..(584): n is a, c, g, or t
  misc_feature (605)..(605): n is a, c, g, or t
  misc_feature (611)..(611): n is a, c, g, or t
  misc_feature (644)..(644): n is a, c, g, or t
  misc_feature (651)..(651): n is a, c, g, or t
  misc_feature (656)..(656): n is a, c, g, or t
  misc_feature (670)..(670): n is a, c, g, or t
  misc_feature (675)..(675): n is a, c, g, or t
  misc_feature (681)..(681): n is a, c, g, or t
  misc_feature (692)..(692): n is a, c, g, or t
ctcagcactgaaagagatagattaaaaacaaaacaaaacaacaaccaaaaaaatacaaacaaacaaacaaaaaaaaaccccaaacaagtcgctcaactgtcttgagtcaatagattttaaaaaatgagttaaggttagggttaggttagggttagggtatagctcaggcagtaaggtacttgccaagaatgtttgaggacctaagtttgncttttttctttctttcttntgaaacagggtttctctgtgtagcctttgntatagaccaaggctggcttcgaactcagaggatccacctgcctctgnctccgagtgncagaattaaaggcatgtgccatcactgtccagctcttaggtattcatttttcagcttatagtcttttggcaagggatgccagggnaggaaccagaggcagggttgaaaaacaggccacngnggggggaacgctgcttccccgggttattttcttgggtcanatcntgtggccttccnggggggtctttcccctttcaaaattntttgggnttggggnggggtccaaatnanttttttnggccgggtttnggggnccccccnntttggntttttttttagaaggcccggngggganaaaccccccggactaaaaaaaaaaggggggganccccccnggggnggaatttttcccgnccctnaaaagnaaaaatttttnttttcc

SEQ ID NO: 61 - DNA, 851 bp, Artificial Sequence
  Description of Artificial Sequence: Note: = synthetic construct
  misc_feature (5)..(5): n is a, c, g, or t
  misc_feature (8)..(8): n is a, c, g, or t
  misc_feature (21)..(21): n is a, c, g, or t
  misc_feature (25)..(27): n is a, c, g, or t
  misc_feature (30)..(30): n is a, c, g, or t
  misc_feature (48)..(48): n is a, c, g, or t
  misc_feature (56)..(56): n is a, c, g, or t
  misc_feature (59)..(60): n is a, c, g, or t
  misc_feature (63)..(63): n is a, c, g, or t
  misc_feature (65)..(65): n is a, c, g, or t
  misc_feature (74)..(74): n is a, c, g, or t
  misc_feature (82)..(84): n is a, c, g, or t
  misc_feature (101)..(101): n is a, c, g, or t
  misc_feature (103)..(103): n is a, c, g, or t
  misc_feature (125)..(125): n is a, c, g, or t
  misc_feature (135)..(135): n is a, c, g, or t
  misc_feature (139)..(139): n is a, c, g, or t
  misc_feature (146)..(147): n is a, c, g, or t
  misc_feature (149)..(150): n is a, c, g, or t
  misc_feature (152)..(153): n is a, c, g, or t
  misc_feature (156)..(156): n is a, c, g, or t
  misc_feature (166)..(166): n is a, c, g, or t
  misc_feature (170)..(170): n is a, c, g, or t
  misc_feature (180)..(180): n is a, c, g, or t
  misc_feature (187)..(188): n is a, c, g, or t
  misc_feature (195)..(195): n is a, c, g, or t
  misc_feature (203)..(203): n is a, c, g, or t
  misc_feature (217)..(217): n is a, c, g, or t
  misc_feature (222)..(222): n is a, c, g, or t
  misc_feature (242)..(242): n is a, c, g, or t
  misc_feature (247)..(247): n is a, c, g, or t
  misc_feature (268)..(269): n is a, c, g, or t
  misc_feature (290)..(291): n is a, c, g, or t
  misc_feature (293)..(294): n is a, c, g, or t
  misc_feature (297)..(297): n is a, c, g, or t
  misc_feature (319)..(319): n is a, c, g, or t
  misc_feature (332)..(332): n is a, c, g, or t
  misc_feature (335)..(335): n is a, c, g, or t
  misc_feature (338)..(338): n is a, c, g, or t
  misc_feature (341)..(342): n is a, c, g, or t
  misc_feature (345)..(347): n is a, c, g, or t
  misc_feature (354)..(354): n is a, c, g, or t
  misc_feature (363)..(363): n is a, c, g, or t
  misc_feature (376)..(376): n is a, c, g, or t
  misc_feature (379)..(379): n is a, c, g, or t
  misc_feature (389)..(389): n is a, c, g, or t
  misc_feature (424)..(424): n is a, c, g, or t
  misc_feature (437)..(437): n is a, c, g, or t
  misc_feature (445)..(445): n is a, c, g, or t
  misc_feature (453)..(453): n is a, c, g, or t
  misc_feature (467)..(468): n is a, c, g, or t
  misc_feature (471)..(471): n is a, c, g, or t
  misc_feature (483)..(483): n is a, c, g, or t
  misc_feature (487)..(489): n is a, c, g, or t
  misc_feature (492)..(492): n is a, c, g, or t
  misc_feature (496)..(496): n is a, c, g, or t
  misc_feature (535)..(536): n is a, c, g, or t
  misc_feature (563)..(563): n is a, c, g, or t
  misc_feature (566)..(566): n is a, c, g, or t
  misc_feature (571)..(571): n is a, c, g, or t
  misc_feature (576)..(576): n is a, c, g, or t
  misc_feature (583)..(583): n is a, c, g, or t
  misc_feature (592)..(592): n is a, c, g, or t
  misc_feature (594)..(594): n is a, c, g, or t
  misc_feature (597)..(597): n is a, c, g, or t
  misc_feature (611)..(612): n is a, c, g, or t
  misc_feature (614)..(614): n is a, c, g, or t
  misc_feature (640)..(640): n is a, c, g, or t
  misc_feature (647)..(647): n is a, c, g, or t
  misc_feature (651)..(651): n is a, c, g, or t
  misc_feature (661)..(662): n is a, c, g, or t
  misc_feature (672)..(672): n is a, c, g, or t
  misc_feature (674)..(674): n is a, c, g, or t
  misc_feature (678)..(678): n is a, c, g, or t
  misc_feature (680)..(680): n is a, c, g, or t
  misc_feature (685)..(685): n is a, c, g, or t
  misc_feature (698)..(698): n is a, c, g, or t
  misc_feature (720)..(720): n is a, c, g, or t
  misc_feature (724)..(724): n is a, c, g, or t
  misc_feature (742)..(742): n is a, c, g, or t
  misc_feature (745)..(746): n is a, c, g, or t
  misc_feature (754)..(754): n is a, c, g, or t
  misc_feature (760)..(760): n is a, c, g, or t
  misc_feature (764)..(764): n is a, c, g, or t
  misc_feature (772)..(772): n is a, c, g, or t
  misc_feature (786)..(786): n is a, c, g, or t
  misc_feature (796)..(796): n is a, c, g, or t
  misc_feature (799)..(799): n is a, c, g, or t
  misc_feature (807)..(807): n is a, c, g, or t
  misc_feature (818)..(818): n is a, c, g, or t
  misc_feature (824)..(824): n is a, c, g, or t
  misc_feature (832)..(832): n is a, c, g, or t
  misc_feature (838)..(838): n is a, c, g, or t
gaaanaantcgggagaaaaanaaannnccnttaagagcttgcccccanagaaaaantannaantnaaaaactgntagaccannngaaaaggaagcgcagtnanaaaatggttcctacgggttaantaagaagcangacngaaaganngnntnnatntaaccggggntagnaaacggcccncttgtannaggaccnaatcgaantagtacgatcatgntacanagggaaggggacgttacccncggangaaacccggcacaagatctcnnaagggagaagattctgaacgnnannaanccacaaggaaattactgtgganacgggaggaatcnatngtnatnnagnnnagctggncactttganaaggcatcgatanaantgatgatggntcaggcgaaagagcatacgtaaaaccaagcaaggnggaatagtcatanaaccatgnaaaaaacnttcaataaaagatnnccngaatattgatcngtannnaanaacncccggtggccgtgattccttttttaacggcaaacagcannttagtttcagatcacccagatcatcgntgnagatnccatngatgttnttgaaactnanctngaggattcaagaanngntgacatggtgaaatgatgtacaaatnacaacanagancgtcgagatnntattcccccngnatgnanggacntcttatgatgaanaccttataccagactcaagtanaacnatatgatcccatgagggnggnnacccaggnagtcangaanaaataccngagagttaaatgcntttttttgtntgngaacccantgcccgacctntcaaanagaagcanagcccnaaaattaatccaa

SEQ ID NO: 62 - DNA, 936 bp, Artificial Sequence
  Description of Artificial Sequence: Note: = synthetic construct
ctaaggaaaaggttttaggagggaaaaccaataggcccttgagttcttattcttaagacattgtaaaggaaaggtttaggggaaaaattaccagcccgatccattagggttccaaaagaaccgttcttccataaaggccagagttcaccatgagtaaccaggatgtttcttcggaccttataaatatattttgaggggttcatggaattgggttgccatttggtagttggtagcctaccctgctccttcccagtgttggatgcagatatgcgccctgttggttttgagtagttttgagatcagtcaattttaggttttatggcaagcatttattcatccccacattttctgccagggtgtagtaagtgagttcttacagagcagagagaaggagcaatctgtgttatcaaatcaactagcaccaagcacaccaagcagccaatccttagaaggaagaagcaaacacttgggtatccttccatggctaggaaatcttcatggctcacgaaccttgggatttccctgtcagggtagaatacaagcagctgagaccgaacaggtatgggtggcatgtcgagacaggaaaagaacctgtgtctggggagaggtgtgtgctacaaagccagagagaggaacagatagggaggggtgtgctgcaccatcatggagggggacagacgatttgtccccaaggaaaagctccctttatgagagttcttactgaatttgggaatgacatgggagaccaagggccaaagtccagatgagcagagtggggaggagggttggaaagttccaaggagagaggcgtgggggtaagggaagctcgcagggctccgcctctgccagtgaccttggaccgctttctctgaggatcagagttatctgtaggggagatgaggttgaaagatacccacaataactttggcaagtaga

SEQ ID NO: 63 - DNA, 911 bp, Artificial Sequence
  Description of Artificial Sequence: Note: = synthetic construct
  misc_feature (14)..(14): n is a, c, g, or t
  misc_feature (29)..(29): n is a, c, g, or t
  misc_feature (41)..(41): n is a, c, g, or t
  misc_feature (55)..(56): n is a, c, g, or t
  misc_feature (59)..(59): n is a, c, g, or t
  misc_feature (63)..(63): n is a, c, g, or t
  misc_feature (71)..(71): n is a, c, g, or t
  misc_feature (81)..(81): n is a, c, g, or t
  misc_feature (84)..(84): n is a, c, g, or t
  misc_feature (99)..(99): n is a, c, g, or t
  misc_feature (101)..(101): n is a, c, g, or t
  misc_feature (115)..(115): n is a, c, g, or t
  misc_feature (166)..(166): n is a, c, g, or t
  misc_feature (182)..(182): n is a, c, g, or t
  misc_feature (187)..(187): n is a, c, g, or t
  misc_feature (198)..(198): n is a, c, g, or t
  misc_feature (231)..(231): n is a, c, g, or t
  misc_feature (272)..(272): n is a, c, g, or t
  misc_feature (276)..(276): n is a, c, g, or t
  misc_feature (286)..(286): n is a, c, g, or t
  misc_feature (382)..(382): n is a, c, g, or t
  misc_feature (473)..(473): n is a, c, g, or t
  misc_feature (540)..(540): n is a, c, g, or t
  misc_feature (866)..(866): n is a, c, g, or t
  misc_feature (869)..(869): n is a, c, g, or t
  misc_feature (881)..(881): n is a, c, g, or t
  misc_feature (904)..(904): n is a, c, g, or t
gggaatttaagggngatttggagactttngaattttcgaangttccaaaatagannttnaggncaatgggnttggggcagnggngcttttttaaatcananaagtattagatttntatggaaaccctgggggttccagtttaatcccttcatcatcttgaaatatnacttgtttatgggaanggtgngatagcagccngaaacagaggtttttattattactgttagagangaggattggggaatagaacaatgagagtcttggtaatattnttcnggaaacaacngacataattggaacattaaggaaatatatccatgcattctgtacttgcaaattgctccaaggaagatggagagtattgtatttcagatagagatangactatacctgttatttttttcattatagcaacattaaaaaagatagtaatctaatttcacataaccattactactaaagtatatatgtantctttgtttatcaggttttacttctcagaaattgcagcatctcctacagagcctgtcaaatgagacngcatagatccccagagaacagagagactgggaaatcattgaaattacacaatcctatcccaaatgtttgcgtagactcaagctcgtatcagctcataagatcagtgtgtgtgtgtgtttgtgtgtgtgtgtgtcccgcacatgcttgagtatgcatgtgtgcatgcatgtgtgtatgtctattgcattagtagagatgttaaggttgaatgtattttctgctcatggtcattgtaagatattgtgctgtatgtgataagaatcaatgtaacaaggctggagagatgacttcagctgttaaaggctagactcactaccaaaaatagngcnatcagtgtgaanttccccacaggagcttagcaagntaatagg

SEQ ID NO: 64 - DNA, 781 bp, Artificial Sequence
  Description of Artificial Sequence: Note: = synthetic construct
ttcaggggtaatcctaaggtaaacggacaaagtaaaggggaggttggaccaataaaggggaaaaataaaagattaaccggatgttccctggaacgacaaattgccttggaagtttcctatacggaaaaaaatgaacaagtttcctgtaaagcaggtagccggaacgtttctaggctataaatttaactggccttatatttacaaagtctaaacattttactggggcattacaattttataacactaattagatcatgtgtgtacacccacagtctgacagacagggtattttttccttcttatcccaagtgagtttaaccttccttctccacatttattgccatgtgcaatgcgtagcttctattaactcctgattattgattgaactttatgagacataagaatgtacttgacaacagcatgtgagaaagggaaagttgagggactgagtgtaatagagactgataagaaatgaatgggctgtgtctgactcttatccaacattccaattcttcaagtctaaaggtgaagggtcattttcaatctactaagtttgaatatgatttgtgctcctggtgtctacagagtattaggaaatgtttggtttgttaggtcattagggtagggctcttatgatagaattcttgtggctttacatggaaaggcagagagaatacacccaccctaaacatttctgccattgtgcaatacagtaaggtatatttctttctttttattaactatttggtgatagtgacaaacaactagacttcatatgtga

SEQ ID NO: 65 - DNA, 389 bp, Artificial Sequence
  Description of Artificial Sequence: Note: = synthetic construct
ttgctcttaggagtttcctaatacatcccaaactcaaatatataaagcatttgacttgttctatgccctagggggcggggggaagctaagccagctttttttaacatttaaaatgttaattccattttaaatgcacagatgtttttatttcataagggtttcaatgtgcatgaatgctgcaatattcctgttaccaaagctagtataaataaaaatagataaacgtggaaattacttagagtttctgtcattaacgtttccttcctcagttgacaacataaatgcgctgctgagaagccagtttgcatctgtcaggatcaatttcccattatgccagtcatattaattactagtcaattagttgatttttatttttgacatatacatgt

SEQ ID NO: 66 - DNA, 340 bp, Artificial Sequence
  Description of Artificial Sequence: Note: = synthetic construct
  misc_feature (9)..(9): n is a, c, g, or t
  misc_feature (12)..(12): n is a, c, g, or t
  misc_feature (31)..(31): n is a, c, g, or t
  misc_feature (33)..(34): n is a, c, g, or t
  misc_feature (44)..(45): n is a, c, g, or t
  misc_feature (49)..(49): n is a, c, g, or t
  misc_feature (55)..(56): n is a, c, g, or t
  misc_feature (59)..(59): n is a, c, g, or t
  misc_feature (61)..(61): n is a, c, g, or t
  misc_feature (65)..(65): n is a, c, g, or t
  misc_feature (72)..(72): n is a, c, g, or t
  misc_feature (78)..(78): n is a, c, g, or t
  misc_feature (83)..(84): n is a, c, g, or t
  misc_feature (93)..(93): n is a, c, g, or t
  misc_feature (102)..(103): n is a, c, g, or t
  misc_feature (108)..(108): n is a, c, g, or t
  misc_feature (128)..(128): n is a, c, g, or t
  misc_feature (130)..(130): n is a, c, g, or t
  misc_feature (137)..(137): n is a, c, g, or t
  misc_feature (154)..(154): n is a, c, g, or t
  misc_feature (156)..(156): n is a, c, g, or t
  misc_feature (162)..(162): n is a, c, g, or t
  misc_feature (165)..(165): n is a, c, g, or t
  misc_feature (167)..(167): n is a, c, g, or t
  misc_feature (179)..(179): n is a, c, g, or t
  misc_feature (185)..(185): n is a, c, g, or t
  misc_feature (190)..(190): n is a, c, g, or t
  misc_feature (193)..(193): n is a, c, g, or t
  misc_feature (195)..(196): n is a, c, g, or t
  misc_feature (206)..(207): n is a, c, g, or t
  misc_feature (211)..(211): n is a, c, g, or t
  misc_feature (217)..(217): n is a, c, g, or t
  misc_feature (224)..(224): n is a, c, g, or t
  misc_feature (229)..(229): n is a, c, g, or t
  misc_feature (234)..(234): n is a, c, g, or t
  misc_feature (242)..(242): n is a, c, g, or t
  misc_feature (246)..(246): n is a, c, g, or t
  misc_feature (249)..(249): n is a, c, g, or t
  misc_feature (262)..(263): n is a, c, g, or t
  misc_feature (268)..(268): n is a, c, g, or t
  misc_feature (273)..(274): n is a, c, g, or t
  misc_feature (280)..(280): n is a, c, g, or t
  misc_feature (282)..(282): n is a, c, g, or t
  misc_feature (288)..(288): n is a, c, g, or t
  misc_feature (290)..(290): n is a, c, g, or t
  misc_feature (293)..(293): n is a, c, g, or t
  misc_feature (295)..(295): n is a, c, g, or t
  misc_feature (297)..(297): n is a, c, g, or t
  misc_feature (302)..(303): n is a, c, g, or t
  misc_feature (305)..(306): n is a, c, g, or t
  misc_feature (314)..(314): n is a, c, g, or t
  misc_feature (318)..(318): n is a, c, g, or t
  misc_feature (332)..(332): n is a, c, g, or t
  misc_feature (335)..(335): n is a, c, g, or t
aaatcgggnttncgcgattcggtaatgacgncnnatccgtaaanncatncgccgnnatncnattngaaaatnccgggngcaanncgatgtctnattgaggtnncaganccatccggcacaggcaatangnaaaaaangggagtttcacaatgtntntgaatntgnanccattgggcccnaaaaantcctncgntnnatgaaccttnncgtncaaaantttggtncgacncagcngctttgcnagcnttnaataaacaccggnntccanaatgnnaccagngntgtttntntcnantngcatnncnntttggaancccncttttcccaaaacnttnaaaaa

SEQ ID NO: 67 - DNA, 557 bp, Artificial Sequence
  Description of Artificial Sequence: Note: = synthetic construct
  misc_feature (9)..(9): n is a, c, g, or t
  misc_feature (19)..(19): n is a, c, g, or t
  misc_feature (31)..(31): n is a, c, g, or t
  misc_feature (61)..(61): n is a, c, g, or t
  misc_feature (66)..(66): n is a, c, g, or t
  misc_feature (74)..(74): n is a, c, g, or t
  misc_feature (80)..(80): n is a, c, g, or t
  misc_feature (90)..(90): n is a, c, g, or t
  misc_feature (103)..(103): n is a, c, g, or t
  misc_feature (114)..(114): n is a, c, g, or t
  misc_feature (121)..(121): n is a, c, g, or t
  misc_feature (126)..(126): n is a, c, g, or t
  misc_feature (130)..(131): n is a, c, g, or t
  misc_feature (140)..(140): n is a, c, g, or t
  misc_feature (170)..(170): n is a, c, g, or t
  misc_feature (175)..(175): n is a, c, g, or t
  misc_feature (184)..(184): n is a, c, g, or t
  misc_feature (205)..(205): n is a, c, g, or t
  misc_feature (209)..(209): n is a, c, g, or t
  misc_feature (229)..(229): n is a, c, g, or t
  misc_feature (233)..(233): n is a, c, g, or t
  misc_feature (237)..(237): n is a, c, g, or t
  misc_feature (241)..(241): n is a, c, g, or t
  misc_feature (258)..(258): n is a, c, g, or t
  misc_feature (265)..(265): n is a, c, g, or t
  misc_feature (281)..(281): n is a, c, g, or t
  misc_feature (302)..(302): n is a, c, g, or t
  misc_feature (304)..(304): n is a, c, g, or t
  misc_feature (306)..(306): n is a, c, g, or t
  misc_feature (316)..(316): n is a, c, g, or t
  misc_feature (370)..(370): n is a, c, g, or t
  misc_feature (383)..(383): n is a, c, g, or t
  misc_feature (388)..(388): n is a, c, g, or t
  misc_feature (401)..(401): n is a, c, g, or t
  misc_feature (424)..(424): n is a, c, g, or t
  misc_feature (427)..(427): n is a, c, g, or t
  misc_feature (432)..(432): n is a, c, g, or t
  misc_feature (439)..(439): n is a, c, g, or t
  misc_feature (442)..(443): n is a, c, g, or t
  misc_feature (462)..(462): n is a, c, g, or t
  misc_feature (466)..(466): n is a, c, g, or t
  misc_feature (468)..(468): n is a, c, g, or t
  misc_feature (473)..(473): n is a, c, g, or t
  misc_feature (480)..(480): n is a, c, g, or t
  misc_feature (483)..(483): n is a, c, g, or t
  misc_feature (487)..(487): n is a, c, g, or t
  misc_feature (499)..(499): n is a, c, g, or t
  misc_feature (510)..(511): n is a, c, g, or t
  misc_feature (517)..(517): n is a, c, g, or t
  misc_feature (546)..(546): n is a, c, g, or t
agtccgggnatggtggcanatgcttttcatnccagcacttgggaaggcaaaaaacagttanacctnaggtttancccagnctttattagnaccccgtgttctnaaacacaaacnacaaaantttgngggnntttaagtgnaaacactgtgtaaaaccttggccctgatgnagggntctcctttngaacagaaaatgtttgaagantccnaaaacatgttgggatgccanacgngttnttgngcatccatctcaacgangttttgngaataaatggcaggtnaaactagtacatcatcatgtngnanccaccgggcntgcagatttgtggtgggaaccaagtcctcccataaaacaggctcctgtggtacnaacagggctgganccacngaatcagtgcagntctggacacctgtctggccgganggnctggnctaagtnaanncagggggggcaagagcatnggancnaacgncagaaancgncccncccggtgagctnttccatgcctnncctcgntttatttggcactgggcatgtcccaactnaacttaggatg

SEQ ID NO: 68 - DNA, 302 bp, Artificial Sequence
  Description of Artificial Sequence: Note: = synthetic construct
  misc_feature (49)..(49): n is a, c, g, or t
  misc_feature (276)..(276): n is a, c, g, or t
  misc_feature (288)..(288): n is a, c, g, or t
  misc_feature (295)..(295): n is a, c, g, or t
gcctataagttttgattccattcgtgaaaatttttcctatatcccgaanagtccacttattactactgcggcctatttggaaactaaccgaaattcagttagttccctagtagcctgctcttgtaatatgtgtacttttcaatattataaaaaattggtcagcagatctgagtaaaacaggtgaaattccgatcggtagtccaatttggttaaagaacaggatatccagtggtccaaggctccagttttgaactcaaacaattatcaaccagctgnaagccctatagnagtacgnagcccat

SEQ ID NO: 69 - DNA, 820 bp, Artificial Sequence
  Description of Artificial Sequence: Note: = synthetic construct
  misc_feature (585)..(585): n is a, c, g, or t
  misc_feature (600)..(600): n is a, c, g, or t
  misc_feature (626)..(626): n is a, c, g, or t
  misc_feature (630)..(630): n is a, c, g, or t
  misc_feature (635)..(635): n is a, c, g, or t
  misc_feature (638)..(638): n is a, c, g, or t
  misc_feature (649)..(649): n is a, c, g, or t
  misc_feature (657)..(658): n is a, c, g, or t
  misc_feature (665)..(665): n is a, c, g, or t
  misc_feature (667)..(667): n is a, c, g, or t
  misc_feature (678)..(678): n is a, c, g, or t
  misc_feature (689)..(689): n is a, c, g, or t
  misc_feature (709)..(710): n is a, c, g, or t
  misc_feature (712)..(712): n is a, c, g, or t
  misc_feature (734)..(735): n is a, c, g, or t
  misc_feature (745)..(745): n is a, c, g, or t
  misc_feature (757)..(757): n is a, c, g, or t
  misc_feature (761)..(761): n is a, c, g, or t
  misc_feature (763)..(763): n is a, c, g, or t
  misc_feature (786)..(786): n is a, c, g, or t
  misc_feature (788)..(788): n is a, c, g, or t
  misc_feature (793)..(793): n is a, c, g, or t
  misc_feature (802)..(802): n is a, c, g, or t
  misc_feature (804)..(804): n is a, c, g, or t
gactgccttttttttcttcccaaggataccctgcagcacccaacagtaaaagacttcataaataggcagcttggagaagaaggcattaccactgaagccatattaaatttcttccctaacggtccccgagagaaccaagctgatgacatgaccagctttgactggagggatatattcaacatcactgaccgcttctgcgcctggctaatcaatacctggaggtaagaggcagcaatccacccgaggaccatagtgaacctcttaatgtcatgggtgaggctagagacctgttagccagtcagctggcactggattcagtctttcatccttcgcacaaagtggtaagggtgccatggccatctgacagacttgcgtgcgactgtcctcacatctcgataacttcatgactcctctggctccccctctttcccttccagcacacatccattcccagctatctccgggctgccattgtctaatgacttctgttggccggtgtccgccaaacctttgagttgagctcattgattgtggacactttactcaaagtttaacagcatgtgaaagaccccgctgacgggtagnaatcactcagaggancctccaaggaacagcgggccacaagnggtnaactnaanagggttattgntaacgggnnccgggancnagtaatcgggnctggccccaantaagggtttgggctttattnncngggacaaaaaccgcaaaaaaannaaacgccttnttgtattaaaangcangnttttagccttggcctgaaatggngntaagntacggcccncngtcaattcctactata

SEQ ID NO: 70 - DNA, 955 bp, Artificial Sequence
  Description of Artificial Sequence: Note: = synthetic construct
  misc_feature (3)..(3): n is a, c, g, or t
  misc_feature (8)..(8): n is a, c, g, or t
  misc_feature (10)..(10): n is a, c, g, or t
  misc_feature (14)..(14): n is a, c, g, or t
  misc_feature (24)..(25): n is a, c, g, or t
  misc_feature (27)..(27): n is a, c, g, or t
  misc_feature (30)..(30): n is a, c, g, or t
  misc_feature (37)..(37): n is a, c, g, or t
  misc_feature (40)..(41): n is a, c, g, or t
  misc_feature (43)..(43): n is a, c, g, or t
  misc_feature (48)..(48): n is a, c, g, or t
  misc_feature (54)..(54): n is a, c, g, or t
  misc_feature (61)..(61): n is a, c, g, or t
  misc_feature (64)..(64): n is a, c, g, or t
  misc_feature (69)..(69): n is a, c, g, or t
  misc_feature (71)..(71): n is a, c, g, or t
  misc_feature (83)..(84): n is a, c, g, or t
  misc_feature (99)..(99): n is a, c, g, or t
  misc_feature (103)..(104): n is a, c, g, or t
  misc_feature (107)..(107): n is a, c, g, or t
  misc_feature (109)..(110): n is a, c, g, or t
  misc_feature (119)..(119): n is a, c, g, or t
  misc_feature (138)..(138): n is a, c, g, or t
  misc_feature (141)..(141): n is a, c, g, or t
  misc_feature (162)..(162): n is a, c, g, or t
  misc_feature (165)..(165): n is a, c, g, or t
  misc_feature (168)..(168): n is a, c, g, or t
  misc_feature (176)..(176): n is a, c, g, or t
  misc_feature (178)..(179): n is a, c, g, or t
  misc_feature (187)..(187): n is a, c, g, or t
  misc_feature (199)..(199): n is a, c, g, or t
  misc_feature (202)..(202): n is a, c, g, or t
  misc_feature (213)..(213): n is a, c, g, or t
  misc_feature (216)..(216): n is a, c, g, or t
  misc_feature (226)..(226): n is a, c, g, or t
  misc_feature (228)..(228): n is a, c, g, or t
  misc_feature (241)..(241): n is a, c, g, or t
  misc_feature (245)..(245): n is a, c, g, or t
  misc_feature (253)..(253): n is a, c, g, or t
  misc_feature (255)..(255): n is a, c, g, or t
  misc_feature (260)..(260): n is a, c, g, or t
  misc_feature (274)..(274): n is a, c, g, or t
  misc_feature (276)..(276): n is a, c, g, or t
  misc_feature (278)..(278): n is a, c, g, or t
  misc_feature (281)..(281): n is a, c, g, or t
  misc_feature (288)..(288): n is a, c, g, or t
  misc_feature (290)..(291): n is a, c, g, or t
  misc_feature (302)..(302): n is a, c, g, or t
  misc_feature (307)..(307): n is a, c, g, or t
  misc_feature (312)..(312): n is a, c, g, or t
  misc_feature (316)..(316): n is a, c, g, or t
  misc_feature (318)..(318): n is a, c, g, or t
  misc_feature (337)..(337): n is a, c, g, or t
  misc_feature (339)..(339): n is a, c, g, or t
  misc_feature (350)..(350): n is a, c, g, or t
  misc_feature (354)..(354): n is a, c, g, or t
  misc_feature (388)..(388): n is a, c, g, or t
  misc_feature (395)..(395): n is a, c, g, or t
  misc_feature (412)..(413): n is a, c, g, or t
  misc_feature (426)..(426): n is a, c, g, or t
  misc_feature (438)..(438): n is a, c, g, or t
  misc_feature (445)..(445): n is a, c, g, or t
  misc_feature (452)..(452): n is a, c, g, or t
  misc_feature (459)..(459): n is a, c, g, or t
  misc_feature (467)..(467): n is a, c, g, or t
  misc_feature (475)..(475): n is a, c, g, or t
  misc_feature (483)..(483): n is a, c, g, or t
  misc_feature (490)..(490): n is a, c, g, or t
  misc_feature (496)..(498): n is a, c, g, or t
  misc_feature (512)..(512): n is a, c, g, or t
  misc_feature (523)..(523): n is a, c, g, or t
  misc_feature (531)..(531): n is a, c, g, or t
  misc_feature (537)..(537): n is a, c, g, or t
  misc_feature (547)..(547): n is a, c, g, or t
  misc_feature (551)..(551): n is a, c, g, or t
  misc_feature (553)..(553): n is a, c, g, or t
  misc_feature (557)..(557): n is a, c, g, or t
  misc_feature (560)..(560): n is a, c, g, or t
  misc_feature (592)..(592): n is a, c, g, or t
  misc_feature (597)..(597): n is a, c, g, or t
  misc_feature (600)..(600): n is a, c, g, or t
  misc_feature (607)..(607): n is a, c, g, or t
  misc_feature (610)..(610): n is a, c, g, or t
  misc_feature (615)..(615): n is a, c, g, or t
  misc_feature (629)..(629): n is a, c, g, or t
  misc_feature (641)..(641): n is a, c, g, or t
  misc_feature (669)..(669): n is a, c, g, or t
  misc_feature (679)..(679): n is a, c, g, or t
  misc_feature (684)..(684): n is a, c, g, or t
  misc_feature (690)..(690): n is a, c, g, or t
  misc_feature (694)..(695): n is a, c, g, or t
  misc_feature (704)..(704): n is a, c, g, or t
  misc_feature (713)..(713): n is a, c, g, or t
  misc_feature (722)..(722): n is a, c, g, or t
  misc_feature (741)..(741): n is a, c, g, or t
  misc_feature (747)..(747): n is a, c, g, or t
  misc_feature (754)..(754): n is a, c, g, or t
  misc_feature (757)..(757): n is a, c, g, or t
  misc_feature (765)..(765): n is a, c, g, or t
  misc_feature (779)..(779): n is a, c, g, or t
  misc_feature (781)..(783): n is a, c, g, or t
  misc_feature (788)..(788): n is a, c, g, or t
  misc_feature (790)..(790): n is a, c, g, or t
  misc_feature (816)..(817): n is a, c, g, or t
  misc_feature (820)..(820): n is a, c, g, or t
  misc_feature (845)..(845): n is a, c, g, or t
  misc_feature (874)..(874): n is a, c, g, or t
  misc_feature (878)..(878): n is a, c, g, or t
  misc_feature (885)..(885): n is a, c, g, or t
  misc_feature (894)..(894): n is a, c, g, or t
  misc_feature (902)..(902): n is a, c, g, or t
  misc_feature (925)..(925): n is a, c, g, or t
aanccganantttnaaaaaacaannanaangggccanganntnaatantttctnaaaaaangantacangnacacggcagggnngtttagtcagaatanaatnnagngnnaaccattgncttttgagcagggtttatnggnctacgttgacccaagtcacantgntancagagatnanngagggggngggaaggggttnggntttccacagcnttnaagtcagaantnggagagacatttngccntgattcangnctttncctccttatttccnancntcncattaanannagaaaagagtnttttnttgtnttgngnacaggtgcacaagtttagnanagaggagacantgtntagagatcagatacggatgagagtttccgggganagtatgnggggattttcagtcagnncactacccagaanggattcagtcgngaggagncaggganggggtgntggagttnagaccganagagcggntagcatntaatgnnnagagaacacacatnttttggatttnagagacgnccaaancgctatacangatntntcgntanagggtgaagagtgaagaaagtgatgtctccancgcanacnggaacangcngcgantttcttagagaccnaggttttgatanagggaaagtctattcaagcctcccgtanacttgtaggncaagnaaatantgcnnattatgagnccgttgttntcaaaccangtcccctatagcagcaaanagttgncagaaantcncacagagntcccccgtgagatngnnnttatngnggacacgatgtcatcaagagggagtnntgnactgtgactccagtcctgttgaagngcatagtagaccattcgccgtgttcaccnacantcagccnctaccagcngaaagagnaaaggagagagttcgcatatganagaccccacgggtagtttgcaagtaatgag

SEQ ID NO: 71 - DNA, 886 bp, Artificial Sequence
  Description of Artificial Sequence: Note: = synthetic construct
  misc_feature (1)..(1): n is a, c, g, or t
  misc_feature (3)..(3): n is a, c, g, or t
  misc_feature (8)..(8): n is a, c, g, or t
  misc_feature (10)..(10): n is a, c, g, or t
  misc_feature (16)..(16): n is a, c, g, or t
  misc_feature (18)..(18): n is a, c, g, or t
  misc_feature (24)..(25): n is a, c, g, or t
  misc_feature (28)..(28): n is a, c, g, or t
  misc_feature (51)..(51): n is a, c, g, or t
  misc_feature (57)..(57): n is a, c, g, or t
  misc_feature (63)..(63): n is a, c, g, or t
  misc_feature (95)..(95): n is a, c, g, or t
  misc_feature (127)..(127): n is a, c, g, or t
  misc_feature (143)..(143): n is a, c, g, or t
  misc_feature (149)..(149): n is a, c, g, or t
  misc_feature (151)..(151): n is a, c, g, or t
  misc_feature (187)..(187): n is a, c, g, or t
  misc_feature (192)..(192): n is a, c, g, or t
  misc_feature (210)..(210): n is a, c, g, or t
  misc_feature (232)..(232): n is a, c, g, or t
  misc_feature (255)..(255): n is a, c, g, or t
  misc_feature (272)..(272): n is a, c, g, or t
  misc_feature (294)..(294): n is a, c, g, or t
  misc_feature (382)..(382): n is a, c, g, or t
  misc_feature (419)..(419): n is a, c, g, or t
  misc_feature (431)..(431): n is a, c, g, or t
  misc_feature (459)..(459): n is a, c, g, or t
  misc_feature (467)..(467): n is a, c, g, or t
  misc_feature (473)..(473): n is a, c, g, or t
  misc_feature (505)..(505): n is a, c, g, or t
  misc_feature (507)..(507): n is a, c, g, or t
  misc_feature (547)..(547): n is a, c, g, or t
  misc_feature (570)..(570): n is a, c, g, or t
  misc_feature (572)..(572): n is a, c, g, or t
  misc_feature (685)..(685): n is a, c, g, or t
  misc_feature (705)..(705): n is a, c, g, or t
ntngaagnanaaattngnaaaaannccnaaaacctccaaatttgctaccantcttcnacggtngacttttaaacaaaaggaggggggggttcttnttcaaatgggccccttcccaatcctgttcccnaggcaattgtttcttntttcancnttcaacggtttttgggttccatccaacttttatttnacccnttgagtttcctggccggngcctagggacctcctttttacntgggccagttcccgttcaagacnacccggcggttagtggncatggggagatggccccatgantccaagacaactgtattcccggttttttagtatttccaagcttcccgccaatttttcttccttccgcttccagacagttttgccagtnacgtgattcggttccgaggccccagcaccatggagantgcgcgctgtantcttagaagggcattcttccgccccacntcccggtntagccngaaggcccacggagcaacgaggagagcgacgntntctccacagccgtggcttttttatggttggcacttaaggnttcgccgccattttgtccgttcntngagttattgtgttgagggcaagatcttacgattgggttttgaaggcatgggtagtggcttgtagacgcatggcaggagttgggattcgtttggggacactgaggggaagccgnttcttggggtgtgtcccctngacgctgttgtgggtggggaccggaactagacgtgccgggctgcggcgcccagcgtgggaggactcgcgcgggctggcagccgggctgggtgtcccggcgcctcactcacattttttgccacgattgtcgcctggtttgatttcccaccaatcccccagaccgtgcacgaggagtagaagc

SEQ ID NO: 72 - DNA, 900 bp, Artificial Sequence
  Description of Artificial Sequence: Note: = synthetic construct
  misc_feature (4)..(4): n is a, c, g, or t
  misc_feature (8)..(8): n is a, c, g, or t
  misc_feature (21)..(21): n is a, c, g, or t
  misc_feature (24)..(24): n is a, c, g, or t
  misc_feature (28)..(30): n is a, c, g, or t
  misc_feature (39)..(39): n is a, c, g, or t
  misc_feature (54)..(54): n is a, c, g, or t
  misc_feature (57)..(57): n is a, c, g, or t
  misc_feature (69)..(69): n is a, c, g, or t
  misc_feature (72)..(72): n is a, c, g, or t
  misc_feature (74)..(74): n is a, c, g, or t
  misc_feature (85)..(87): n is a, c, g, or t
  misc_feature (91)..(91): n is a, c, g, or t
  misc_feature (99)..(99): n is a, c, g, or t
  misc_feature (103)..(105): n is a, c, g, or t
  misc_feature (112)..(112): n is a, c, g, or t
  misc_feature (120)..(120): n is a, c, g, or t
  misc_feature (125)..(125): n is a, c, g, or t
  misc_feature (142)..(142): n is a, c, g, or t
  misc_feature (147)..(147): n is a, c, g, or t
  misc_feature (161)..(161): n is a, c, g, or t
  misc_feature (168)..(168): n is a, c, g, or t
  misc_feature (179)..(180): n is a, c, g, or t
  misc_feature (187)..(188): n is a, c, g, or t
  misc_feature (198)..(198): n is a, c, g, or t
  misc_feature (207)..(207): n is a, c, g, or t
  misc_feature (209)..(210): n is a, c, g, or t
  misc_feature (212)..(212): n is a, c, g, or t
  misc_feature (215)..(215): n is a, c, g, or t
  misc_feature (221)..(221): n is a, c, g, or t
  misc_feature (223)..(223): n is a, c, g, or t
  misc_feature (225)..(225): n is a, c, g, or t
  misc_feature (227)..(227): n is a, c, g, or t
  misc_feature (249)..(250): n is a, c, g, or t
  misc_feature (278)..(278): n is a, c, g, or t
  misc_feature (284)..(284): n is a, c, g, or t
  misc_feature (290)..(290): n is a, c, g, or t
  misc_feature (298)..(298): n is a, c, g, or t
  misc_feature (305)..(305): n is a, c, g, or t
  misc_feature (307)..(308): n is a, c, g, or t
  misc_feature (352)..(352): n is a, c, g, or t
  misc_feature (354)..(354): n is a, c, g, or t
  misc_feature (356)..(356): n is a, c, g, or t
  misc_feature (359)..(359): n is a, c, g, or t
  misc_feature (362)..(362): n is a, c, g, or t
  misc_feature (364)..(364): n is a, c, g, or t
  misc_feature (380)..(380): n is a, c, g, or t
  misc_feature (382)..(382): n is a, c, g, or t
  misc_feature (391)..(391): n is a, c, g, or t
  misc_feature (396)..(397): n is a, c, g, or t
  misc_feature (400)..(400): n is a, c, g, or t
  misc_feature (403)..(404): n is a, c, g, or t
  misc_feature (406)..(406): n is a, c, g, or t
  misc_feature (412)..(412): n is a, c, g, or t
  misc_feature (431)..(431): n is a, c, g, or t
  misc_feature (449)..(450): n is a, c, g, or t
  misc_feature (452)..(452): n is a, c, g, or t
  misc_feature (456)..(456): n is a, c, g, or t
  misc_feature (460)..(460): n is a, c, g, or t
  misc_feature (478)..(478): n is a, c, g, or t
  misc_feature (487)..(487): n is a, c, g, or t
  misc_feature (491)..(491): n is a, c, g, or t
  misc_feature (494)..(494): n is a, c, g, or t
  misc_feature (497)..(497): n is a, c, g, or t
  misc_feature (501)..(501): n is a, c, g, or t
  misc_feature (504)..(504): n is a, c, g, or t
  misc_feature (508)..(508): n is a, c, g, or t
  misc_feature (513)..(513): n is a, c, g, or t
  misc_feature (517)..(517): n is a, c, g, or t
  misc_feature (526)..(528): n is a, c, g, or t
  misc_feature (530)..(530): n is a, c, g, or t
  misc_feature (544)..(544): n is a, c, g, or t
  misc_feature (554)..(554): n is a, c, g, or t
  misc_feature (559)..(559): n is a, c, g, or t
  misc_feature (563)..(563): n is a, c, g, or t
  misc_feature (568)..(568): n is a, c, g, or t
  misc_feature (572)..(572): n is a, c, g, or t
  misc_feature (574)..(577): n is a, c, g, or t
  misc_feature (584)..(584): n is a, c, g, or t
  misc_feature (588)..(588): n is a, c, g, or t
  misc_feature (596)..(596): n is a, c, g, or t
  misc_feature (607)..(607): n is a, c, g, or t
  misc_feature (621)..(621): n is a, c, g, or t
  misc_feature (626)..(626): n is a, c, g, or t
  misc_feature (630)..(630): n is a, c, g, or t
  misc_feature (641)..(641): n is a, c, g, or t
  misc_feature (643)..(643): n is a, c, g, or t
  misc_feature (652)..(653): n is a, c, g, or t
  misc_feature (655)..(655): n is a, c, g, or t
  misc_feature (664)..(664): n is a, c, g, or t
  misc_feature (671)..(671): n is a, c, g, or t
  misc_feature (678)..(678): n is a, c, g, or t
  misc_feature (681)..(681): n is a, c, g, or t
  misc_feature (685)..(685): n is a, c, g, or t
  misc_feature (690)..(690): n is a, c, g, or t
  misc_feature (704)..(704): n is a, c, g, or t
  misc_feature (713)..(714): n is a, c, g, or t
  misc_feature (716)..(716): n is a, c, g, or t
  misc_feature (718)..(718): n is a, c, g, or t
  misc_feature (747)..(747): n is a, c, g, or t
  misc_feature (749)..(749): n is a, c, g, or t
  misc_feature (757)..(757): n is a, c, g, or t
  misc_feature (759)..(759): n is a, c, g, or t
  misc_feature (783)..(783): n is a, c, g, or t
  misc_feature (792)..(792): n is a, c, g, or t
  misc_feature (823)..(823): n is a, c, g, or t
  misc_feature (825)..(825): n is a, c, g, or t
  misc_feature (833)..(833): n is a, c, g, or t
  misc_feature (842)..(842): n is a, c, g, or t
  misc_feature (845)..(845): n is a, c, g, or t
  misc_feature (847)..(847): n is a, c, g, or t
  misc_feature (853)..(853): n is a, c, g, or t
  misc_feature (870)..(870): n is a, c, g, or t
gggngttngctctcagatgcnagntacnnntcagggggngtctcacgagaaaanctnatgtgtgggggntantntgtatcccctnnnctcnctcgagancccnnntctcganattttggngaccnggggccggggcccaganactcnccaccccatatggngaccctntataagtgtcnnccagggnntgttttgggnaaaatatancnnanagnggtgtntntnanatctcggggggtgacagacccnnatttttttttataaagacccggggcatnttctcngccccntctcctcngctacangnnacccacacacagtgtgtctcctctcagccccctggcacactttntntngantcngnggggatatgagattcncnagactgggnccgcnntantanncncccccntgtctcctctcatagtgtngtgtccccccctcacccnntnttgnggtnccctacacccacacaatntagactctncccnccntcngctntgngacncacanctgnaaatcccgnnncncaaaaagggctgtnctcctctctnttacngggnggtcncccncnnnngactctnaaangtccctcncaaaagggacncttttctatacacncttantttncctcctttgtntngcaaaaaannancctgtgttnccccccnctttatnatntttnttttnttccccaaactaancttttaggnntnancttccggggccccaaccccaaaatcccantnttcttttntnttggttggggtgtcaaaattcctncccctaaanttttgaaccccctttaattcccccccccggntnaaggcccnacttccctnggntnttttcnctaaaaaattttttgtngccctccctgggaaatccccggtattcctc

SEQ ID NO: 73 - DNA, 1033 bp, Artificial Sequence
  Description of Artificial Sequence: Note: = synthetic construct
  misc_feature (333)..(333): n is a, c, g, or t
  misc_feature (336)..(336): n is a, c, g, or t
  misc_feature (355)..(355): n is a, c, g, or t
  misc_feature (397)..(397): n is a, c, g, or t
  misc_feature (431)..(431): n is a, c, g, or t
  misc_feature (461)..(461): n is a, c, g, or t
  misc_feature (464)..(464): n is a, c, g, or t
  misc_feature (471)..(471): n is a, c, g, or t
  misc_feature (515)..(515): n is a, c, g, or t
  misc_feature (549)..(549): n is a, c, g, or t
  misc_feature (576)..(576): n is a, c, g, or t
  misc_feature (966)..(966): n is a, c, g, or t
  misc_feature (1022)..(1022): n is a, c, g, or t
cctacgttcacctatgcgtaacagatctgctgtgtcaggagcctcctaccctcgcgcatcctgacccccaaccacgtcctcttatctgatgactggtcatcttcccaagtcatacacctcaccagatcactcgtggggatctctaggccacctcctgtggtaccctaggccttggatcactactaactcctgcatcgtggtaacctcaatggctgatcttgaggatgcagtctggagttcgactccatcaggaagccacatggggaggtggctgaatgccacaggcacctaccacataatgcttcatgtccccacaatagtgtcatcaagcancgntatctccctttgtacctgnctatcacagtaggccctatgtgttgaagacagaaacgttctnatactcaaaatagctacctactttcatctttagnaaagttatcaccagagatttcatcacatgnctnggcttangtattttatcccctttctgaactatttatcacgggcagaaaatntactgattatccctgtatcatgacatcgtgctgnagagaagacccgagtgggcagcatggngatccaaggagacaagggaaaccaagcagctatacataggatgtcagcagcaagcccttccctgcccacgtcagactaaacccttcagtcccttcatcttttcctagaagggtttgtaatttctgttgattgtgcaccagcgcttcccaatcgctgaacatctttcttcgaatgtgactcaaagtgagtgcaccgagtctggctaatgtcctctgctcctcttaacctctgtggcacactcctcctaacacatgtgtgtcgtcttgttccacagtggccccacggtactggtttcaatatagcttatgtatgagcaataagggctatgtatttttttttttcagacactgttccttttgtattcaacaacctcctcacatactcagccgnaccacatttcttccaggtcaaaaaccatctctccaatttgttatgaattactcctncaagttcaggt

SEQ ID NO: 74 - DNA, 883 bp, Artificial Sequence
  Description of Artificial Sequence: Note: = synthetic construct
  misc_feature (7)..(8): n is a, c, g, or t
  misc_feature (11)..(11): n is a, c, g, or t
  misc_feature (25)..(26): n is a, c, g, or t
  misc_feature (28)..(29): n is a, c, g, or t
  misc_feature (32)..(32): n is a, c, g, or t
  misc_feature (36)..(36): n is a, c, g, or t
  misc_feature (52)..(53): n is a, c, g, or t
  misc_feature (61)..(61): n is a, c, g, or t
  misc_feature (67)..(67): n is a, c, g, or t
  misc_feature (77)..(77): n is a, c, g, or t
  misc_feature (85)..(85): n is a, c, g, or t
  misc_feature (105)..(105): n is a, c, g, or t
  misc_feature (107)..(107): n is a, c, g, or t
  misc_feature (112)..(112): n is a, c, g, or t
  misc_feature (118)..(118): n is a, c, g, or t
  misc_feature (155)..(155): n is a, c, g, or t
  misc_feature (159)..(160): n is a, c, g, or t
  misc_feature (180)..(180): n is a, c, g, or t
  misc_feature (184)..(184): n is a, c, g, or t
  misc_feature (199)..(200): n is a, c, g, or t
  misc_feature (202)..(202): n is a, c, g, or t
  misc_feature (248)..(248): n is a, c, g, or t
  misc_feature (250)..(250): n is a, c, g, or t
  misc_feature (259)..(259): n is a, c, g, or t
  misc_feature (266)..(266): n is a, c, g, or t
  misc_feature (273)..(274): n is a, c, g, or t
  misc_feature (277)..(277): n is a, c, g, or t
  misc_feature (303)..(303): n is a, c, g, or t
  misc_feature (330)..(330): n is a, c, g, or t
  misc_feature (335)..(335): n is a, c, g, or t
  misc_feature (338)..(338): n is a, c, g, or t
  misc_feature (345)..(345): n is a, c, g, or t
  misc_feature (474)..(474): n is a, c, g, or t
  misc_feature (500)..(500): n is a, c, g, or t
  misc_feature (582)..(582): n is a, c, g, or t
  misc_feature (688)..(688): n is a, c, g, or t
  misc_feature (696)..(696): n is a, c, g, or t
  misc_feature (721)..(721): n is a, c, g, or t
  misc_feature (749)..(749): n is a, c, g, or t
ggggggnnaanaatttcccaaaaanngnnggncccnttttttatccagtttnnggttgaanatctcnccccggtttnaaaacccncaatggggaaaaaggtacancngattntttatnggtttgggcggagggggaaatttttttggtttttttntttnngggatttttgaaaaaaaaangaantttttaggtttcccnnangtaatttatttcaatggaccatttttggggttctcccttttgtaanangttaaaaanaaggganttccaannttncttttcagtttccagtttcaccttcngtagcagacccagttttcattttgagntggtnccnaaaaggnttcccaactatgttcaataccacaggcagcctgcaggagggagaatgggtatgtatttaacagcatttgaccaaattataagagcagagaggagctttaccagggacaggaaggcaaaagagctgaatnttaaacaaaagaataagaacaggatntcatctgtgagctgtcacagtgggtttgcagagcaggagaacacagacaggattagctataaagttgttacattagttattntattggagcatacaatacttaaatagttctagggcaagagaaatgaacagaaatgaccttataagagccagagctgtagccacagctttctttgtgcttagtttgntagttcantctttccagggcagtctggtggatnacaccaaattgctttagaaaatgctagntctactgtccctgtctattgtcagctttgcaatgtgcatagtgacaggagttgcctgggagcttggggcttatgttttgcagatccattgtaattaaaaaagaattgtaaggagatggaggcacggggtgaggg

SEQ ID NO: 75 - DNA, 892 bp, Artificial Sequence
  Description of Artificial Sequence: Note: = synthetic construct
  misc_feature (568)..(568): n is a, c, g, or t
  misc_feature (577)..(577): n is a, c, g, or t
  misc_feature (586)..(586): n is a, c, g, or t
  misc_feature (604)..(604): n is a, c, g, or t
  misc_feature (624)..(624): n is a, c, g, or t
  misc_feature (642)..(643): n is a, c, g, or t
  misc_feature (653)..(653): n is a, c, g, or t
  misc_feature (666)..(666): n is a, c, g, or t
  misc_feature (669)..(669): n is a, c, g, or t
  misc_feature (671)..(671): n is a, c, g, or t
  misc_feature (682)..(682): n is a, c, g, or t
  misc_feature (686)..(687): n is a, c, g, or t
  misc_feature (690)..(690): n is a, c, g, or t
  misc_feature (694)..(694): n is a, c, g, or t
  misc_feature (702)..(702): n is a, c, g, or t
  misc_feature (704)..(704): n is a, c, g, or t
  misc_feature (708)..(708): n is a, c, g, or t
  misc_feature (717)..(717): n is a, c, g, or t
  misc_feature (727)..(727): n is a, c, g, or t
  misc_feature (731)..(731): n is a, c, g, or t
  misc_feature (740)..(742): n is a, c, g, or t
  misc_feature (764)..(765): n is a, c, g, or t
  misc_feature (775)..(775): n is a, c, g, or t
  misc_feature (777)..(777): n is a, c, g, or t
  misc_feature (784)..(784): n is a, c, g, or t
  misc_feature (801)..(801): n is a, c, g, or t
  misc_feature (808)..(808): n is a, c, g, or t
  misc_feature (813)..(813): n is a, c, g, or t
  misc_feature (824)..(824): n is a, c, g, or t
  misc_feature (826)..(826): n is a, c, g, or t
  misc_feature (828)..(829): n is a, c, g, or t
  misc_feature (836)..(836): n is a, c, g, or t
  misc_feature (850)..(850): n is a, c, g, or t
  misc_feature (858)..(858): n is a, c, g, or t
  misc_feature (863)..(863): n is a, c, g, or t
  misc_feature (866)..(866): n is a, c, g, or t
  misc_feature (875)..(875): n is a, c, g, or t
  misc_feature (879)..(879): n is a, c, g, or t
  misc_feature (886)..(889): n is a, c, g, or t
gggcccccctcgaggtcgacggtatcgataagcttgatatcgaattcagctcttagcaatctgacaccctcttctggcctcttcaggcacctgcatggttccacaggactgtcacacccacgtacatagatagtcaaaatctagagcactgtttctatacctgtgagttgcaacccctttgggagtgcggtcaaatgaccctatcacaggggtctcaaatgagatatcctgcatatcaaatatttacattatgattcatagtagtaccagaattacagttatgaagttacaaaataattttatagctgagagtcaccacaacatgcataactgtattaaaatgttacagcattagcaaggttgagaaatactggtctagagccattccttgtgctgataaaggtggcagtgagcattatctttctgtctccacaccactagcaaattttttctctatatataaacatgtaatatgagacagtctgaatccactgaggcacggtctgactccagaacaaaggatcgtattcctgaaaagcaaaacgtgtgtttggcactgactgtgtgncccaggttntctttctgnactcctagaggtctgtantgggtcttgaagcacagatnctctaaccttaccctggnngctcagtagnatgccccaaaacncangntgttcaacatngggnnccncccngaaacagngntgtnggatttggnagaaaggtgnaatnctttgggcnnntcggtttaggaattttaaacannaactggcttncnaggtccnttccggagtcatccttncactggngcccnctggacccggngnanngggccanttcgccagttcgtncccctggnacccntcnccgggggcnaaangcccctnnnnttc

SEQ ID NO: 76 - DNA, 884 bp, Artificial Sequence
  Description of Artificial Sequence: Note: = synthetic construct
tgggcccccctcgaggtcgacggtatcgataagcttgagggacccacgtgatggaaagggagaagcaatttagtgtcctttgtcctctgacctccacaagtgctgtggcatggggacacaggactgtacacacacacacacacacacacacacacacacacacacacgcacgcacacacacccctcaagtaaccgtggaataaaggtccgaccagaaaccacgctggaacgggagatgctggagcacatcagggtggtgctaagcagcagatcggcctgtaactggcagcagaggggtgtggctctttcagaaccaggagggcatcgcccctccagccagactctccagctttcttcccctccttgcctcctgttttccttctgcctaccttcctttggcctcaaaccataatgtgcaacacattcaaactgtagtaagtgttttaattttctactaaacaataaaacctttagattttcactgggccagtgctggtaacagcagactgggtggagtatcacagagggtgtggagcaagctggctacccagggctgggcacactcaacactctggcattctgtggaagttctgggcagtaaaaacagaagcatacgtcacgcacaggttccatagtgttaggcatcttaatctatctagaatacctggtgtttagtttgtttacaaaattgattgttgtacttggacagtggtgtttttttcccagggcttccaggatttaggggtataccaggcccattacattgggtaaacgtgtgtgttaattttttctttttaaacctccttggttgactacttgttttcctttttaatggtcccagttccccttggggggtttgttttggaaaaaggctttccggtttc

SEQ ID NO: 77 - DNA, 326 bp, Artificial Sequence
  Description of Artificial Sequence: Note: = synthetic construct
agcacaccacagagagggggtctccgtgcccgagaggcaaaagtctcccactgtgctcctctccccccctggtgggggttaagagatgggggctctggggggtgatagaacccctggcgggacacccccccgctctcgtggagagagacagaggggggtgcccctgatatctcactagaggggagaggtgagagggctccacagtgtggtgtggtggtgagtgctctatctccaggtgtctcacatattttcacagctcttgaccacagagagatcttgttgactctgtgctcgcggaatctaatgtgccccacatcatatacaca

SEQ ID NO: 78 - DNA, 557 bp, Artificial Sequence
  Description of Artificial Sequence: Note: = synthetic construct
  misc_feature (14)..(15): n is a, c, g, or t
  misc_feature (18)..(18): n is a, c, g, or t
  misc_feature (20)..(20): n is a, c, g, or t
  misc_feature (26)..(26): n is a, c, g, or t
  misc_feature (29)..(29): n is a, c, g, or t
  misc_feature (55)..(55): n is a, c, g, or t
  misc_feature (58)..(58): n is a, c, g, or t
  misc_feature (60)..(61): n is a, c, g, or t
  misc_feature (63)..(63): n is a, c, g, or t
  misc_feature (66)..(66): n is a, c, g, or t
  misc_feature (74)..(74): n is a, c, g, or t
  misc_feature (90)..(90): n is a, c, g, or t
  misc_feature (111)..(111): n is a, c, g, or t
  misc_feature (134)..(134): n is a, c, g, or t
  misc_feature (143)..(143): n is a, c, g, or t
  misc_feature (148)..(148): n is a, c, g, or t
  misc_feature (156)..(156): n is a, c, g, or t
  misc_feature (162)..(162): n is a, c, g, or t
  misc_feature (164)..(164): n is a, c, g, or t
  misc_feature (171)..(171): n is a, c, g, or t
  misc_feature (173)..(173): n is a, c, g, or t
  misc_feature (175)..(175): n is a, c, g, or t
  misc_feature (179)..(179): n is a, c, g, or t
  misc_feature (181)..(182): n is a, c, g, or t
  misc_feature (190)..(190): n is a, c, g, or t
  misc_feature (199)..(199): n is a, c, g, or t
  misc_feature (208)..(208): n is a, c, g, or t
  misc_feature (220)..(220): n is a, c, g, or t
  misc_feature (229)..(229): n is a, c, g, or t
  misc_feature (248)..(248): n is a, c, g, or t
  misc_feature (252)..(252): n is a, c, g, or t
  misc_feature (261)..(261): n is a, c, g, or t
  misc_feature (263)..(263): n is a, c, g, or t
  misc_feature (278)..(278): n is a, c, g, or t
  misc_feature (283)..(283): n is a, c, g, or t
  misc_feature (288)..(288): n is a, c, g, or t
  misc_feature (291)..(291): n is a, c, g, or t
  misc_feature (298)..(298): n is a, c, g, or t
  misc_feature (300)..(300): n is a, c, g, or t
  misc_feature (304)..(304): n is a, c, g, or t
  misc_feature (308)..(308): n is a, c, g, or t
  misc_feature (311)..(311): n is a, c, g, or t
  misc_feature (316)..(316): n is a, c, g, or t
  misc_feature (318)..(319): n is a, c, g, or t
  misc_feature (322)..(322): n is a, c, g, or t
  misc_feature (337)..(337): n is a, c, g, or t
  misc_feature (345)..(345): n is a, c, g, or t
  misc_feature (349)..(349): n is a, c, g, or t
  misc_feature (381)..(381): n is a, c, g, or t
  misc_feature (401)..(401): n is a, c, g, or t
  misc_feature (408)..(408): n is a, c, g, or t
  misc_feature (413)..(413): n is a, c, g, or t
  misc_feature (419)..(419): n is a, c, g, or t
  misc_feature (421)..(421): n is a, c, g, or t
  misc_feature (423)..(423): n is a, c, g, or t
  misc_feature (434)..(434): n is a, c, g, or t
  misc_feature (455)..(455): n is a, c, g, or t
  misc_feature (482)..(482): n is a, c, g, or t
  misc_feature (484)..(484): n is a, c, g, or t
  misc_feature (494)..(494): n is a, c, g, or t
  misc_feature (502)..(502): n is a, c, g, or t
  misc_feature (509)..(509): n is a, c, g, or t
  misc_feature (513)..(513): n is a, c, g, or t
  misc_feature (522)..(522): n is a, c, g, or t
  misc_feature (526)..(526): n is a, c, g, or t
  misc_feature (536)..(536): n is a, c, g, or t
  misc_feature (549)..(549): n is a, c, g, or t
  misc_feature (551)..(551): n is a, c, g, or t
  misc_feature (553)..(553): n is a, c, g, or t
gggggggtctcacnntanancactcnggngtctcccatgtctagatctccccccngcncnngngangagtgtgnggagatccctctctgntctctacactctaaagggtangcggggagagagagagagcacantctatagancacanagcacacncgctcnangtgcccnantnacangnnagagagancccctctcncagtatatnggggagagagtntgagggacnctcctcttttctctcaacnctgnggggggagngngagtgttctctctgnggggnggagnggnacactcngntctncgtntgngtgcncnngtnttctgggggtcacanagaaatcncctntctcaacacaacaacaacaaccccccgcacgngcacacaccacaacaacaangggacancgcgngggggntngngcacacccagnggagacactgttttctgtttnacacacacacacacacacacacacacncnccccccacanagtttttnggaaaancgcnggggggggngggnctttttgccncaagccttttttnancnccca

SEQ ID NO: 79 - DNA, 376 bp, Artificial Sequence
  Description of Artificial Sequence: Note: = synthetic construct
gtctcccccaaagggggggtctcaccctcccggacaccacacatctgtctgtctctctgatctctgacaccccacagagatatatatagggacaacgccgctgtccccatgatatagagagaagcgagacaaactctcaggtacacatgacacatgatccccatgatccccggcacactcttctaatatagttgagagagttgtgtctctcaagtgtctctggtattttctaaccccatgttttctctcacaatgtcacacgggggagctcggacgcggtgcacatgggggagagttcgtgtctatgacacactagtcttgcccccgaaccacagagacctcgactcgggtttagtctcctctgcccccccagctc

SEQ ID NO: 80 - DNA, 533 bp, Artificial Sequence
  Description of Artificial Sequence: Note: = synthetic construct
  misc_feature (3)..(4): n is a, c, g, or t
  misc_feature (10)..(10): n is a, c, g, or t
  misc_feature (15)..(15): n is a, c, g, or t
  misc_feature (19)..(19): n is a, c, g, or t
  misc_feature (24)..(26): n is a, c, g, or t
  misc_feature (37)..(37): n is a, c, g, or t
  misc_feature (41)..(41): n is a, c, g, or t
  misc_feature (48)..(48): n is a, c, g, or t
  misc_feature (50)..(50): n is a, c, g, or t
  misc_feature (65)..(65): n is a, c, g, or t
  misc_feature (68)..(69): n is a, c, g, or t
  misc_feature (78)..(78): n is a, c, g, or t
  misc_feature (89)..(89): n is a, c, g, or t
  misc_feature (91)..(91): n is a, c, g, or t
  misc_feature (110)..(110): n is a, c, g, or t
  misc_feature (141)..(141): n is a, c, g, or t
  misc_feature (152)..(152): n is a, c, g, or t
  misc_feature (156)..(156): n is a, c, g, or t
  misc_feature (160)..(160): n is a, c, g, or t
  misc_feature (164)..(164): n is a, c, g, or t
  misc_feature (176)..(176): n is a, c, g, or t
  misc_feature (183)..(184): n is a, c, g, or t
  misc_feature (191)..(191): n is a, c, g, or t
  misc_feature (193)..(193): n is a, c, g, or t
  misc_feature (203)..(203): n is a, c, g, or t
  misc_feature (207)..(208): n is a, c, g, or t
  misc_feature (210)..(211): n is a, c, g, or t
  misc_feature (213)..(213): n is a, c, g, or t
  misc_feature (220)..(220): n is a, c, g, or t
  misc_feature (222)..(223): n is a, c, g, or t
  misc_feature (225)..(225): n is a, c, g, or t
  misc_feature (227)..(227): n is a, c, g, or t
  misc_feature (229)..(229): n is a, c, g, or t
  misc_feature (233)..(234): n is a, c, g, or t
  misc_feature (241)..(241): n is a, c, g, or t
  misc_feature (243)..(243): n is a, c, g, or t
  misc_feature (245)..(245): n is a, c, g, or t
  misc_feature (249)..(249): n is a, c, g, or t
  misc_feature (253)..(253): n is a, c, g, or t
  misc_feature (265)..(265): n is a, c, g, or t
  misc_feature (267)..(267): n is a, c, g, or t
  misc_feature (269)..(269): n is a, c, g, or t
  misc_feature (271)..(271): n is a, c, g, or t
  misc_feature (274)..(274): n is a, c, g, or t
  misc_feature (286)..(286): n is a, c, g, or t
  misc_feature (296)..(297): n is a, c, g, or t
  misc_feature (299)..(299): n is a, c, g, or t
  misc_feature (310)..(312): n is a, c, g, or t
  misc_feature (327)..(327): n is a, c, g, or t
  misc_feature (333)..(333): n is a, c, g, or t
  misc_feature (343)..(343): n is a, c, g, or t
  misc_feature (353)..(353): n is a, c, g, or t
  misc_feature (357)..(357): n is a, c, g, or t
  misc_feature (361)..(362): n is a, c, g, or t
  misc_feature (377)..(377): n is a, c, g, or t
  misc_feature (381)..(381): n is a, c, g, or t
  misc_feature (383)..(383): n is a, c, g, or t
  misc_feature (426)..(426): n is a, c, g, or t
  misc_feature (436)..(436): n is a, c, g, or t
  misc_feature (458)..(458): n is a, c, g, or t
  misc_feature (460)..(460): n is a, c, g, or t
  misc_feature (463)..(463): n is a, c, g, or t
  misc_feature (466)..(466): n is a, c, g, or t
  misc_feature (469)..(469): n is a, c, g, or t
  misc_feature (472)..(472): n is a, c, g, or t
  misc_feature (476)..(476): n is a, c, g, or t
  misc_feature (485)..(485): n is a, c, g, or t
  misc_feature (499)..(499): n is a, c, g, or t
  misc_feature (515)..(515): n is a, c, g, or t
  misc_feature (518)..(519): n is a, c, g, or t
  misc_feature (528)..(528): n is a, c, g, or t
atnncccaanatcanatgnggaannncccacattttntatntagaaangngttttgtgtgtgtgngtnnaatttgagntttcacagagntnacattctctgtgtcacaanccctttctctctacactccacagtgtggtgngagatatactntganacanatgngctctctcctcnccccccnncatgttntnccccacagtntacnncnncnatatatngnncncngnagannggtatgngngntgtntttntttaaaaagatntnananagngggtatgcgtgnggggtatgtnnanacatatatgtnnnagagggtctctctgnggcccnatggaggcanatcccccccnctcngagnnatatagaaaagagtntttnanggtgtttgtggacacagataaggggagagagagagagagaganagagagaganagagagagagagagagagagananggngtnttnggnttcntcccccccnatatacagaaaaancgggggggggttaggnggnngggggtttncttta

SEQ ID NO: 81 - DNA, 346 bp, Artificial Sequence
  Description of Artificial Sequence: Note: = synthetic construct
  misc_feature (321)..(321): n is a, c, g, or t
tttcacacgagatgtcgcgactctcgcgagactctcagcgcggagatatagacccacaaggggaatcccccgggttttttgccacaggagagcgcgaggagagagatattcttattatggctatagacacccccgtgggtgggggacatttgtggtgtttccacagggggggggatgtaccccggatatcagagtattctctaaaaaaggtgagaagaggtcttctcttttgagagtatggggacactcgaggagagctctctatctatctctcacagcgcccctgtgtgggcggatcctccacaccagatgttagtgtgnagatctccccatcttctatattgaa

SEQ ID NO: 82 - DNA, 461 bp, Artificial Sequence
  Description of Artificial Sequence: Note: = synthetic construct
  misc_feature (4)..(4): n is a, c, g, or t
  misc_feature (16)..(16): n is a, c, g, or t
  misc_feature (20)..(20): n is a, c, g, or t
  misc_feature (30)..(31): n is a, c, g, or t
  misc_feature (36)..(36): n is a, c, g, or t
  misc_feature (53)..(53): n is a, c, g, or t
  misc_feature (59)..(59): n is a, c, g, or t
  misc_feature (63)..(64): n is a, c, g, or t
  misc_feature (81)..(81): n is a, c, g, or t
  misc_feature (88)..(88): n is a, c, g, or t
  misc_feature (104)..(104): n is a, c, g, or t
  misc_feature (107)..(107): n is a, c, g, or t
  misc_feature (114)..(114): n is a, c, g, or t
  misc_feature (117)..(117): n is a, c, g, or t
  misc_feature (131)..(131): n is a, c, g, or t
  misc_feature (147)..(147): n is a, c, g, or t
  misc_feature (149)..(149): n is a, c, g, or t
  misc_feature (167)..(167): n is a, c, g, or t
  misc_feature (193)..(194): n is a, c, g, or t
  misc_feature (204)..(204): n is a, c, g, or t
  misc_feature (216)..(216): n is a, c, g, or t
  misc_feature (220)..(221): n is a, c, g, or t
  misc_feature (223)..(223): n is a, c, g, or t
  misc_feature (235)..(235): n is a, c, g, or t
  misc_feature (237)..(237): n is a, c, g, or t
  misc_feature (245)..(245): n is a, c, g, or t
  misc_feature (254)..(254): n is a, c, g, or t
  misc_feature (280)..(280): n is a, c, g, or t
  misc_feature (286)..(286): n is a, c, g, or t
  misc_feature (311)..(311): n is a, c, g, or t
  misc_feature (317)..(317): n is a, c, g, or t
  misc_feature (331)..(332): n is a, c, g, or t
  misc_feature (336)..(336): n is a, c, g, or t
  misc_feature (345)..(345): n is a, c, g, or t
  misc_feature (350)..(350): n is a, c, g, or t
  misc_feature (367)..(368): n is a, c, g, or t
  misc_feature (390)..(390): n is a, c, g, or t
  misc_feature (395)..(395): n is a, c, g, or t
  misc_feature (410)..(410): n is a, c, g, or t
  misc_feature (428)..(428): n is a, c, g, or t
  misc_feature (432)..(432): n is a, c, g, or t
  misc_feature (439)..(439): n is a, c, g, or t
  misc_feature (451)..(451): n is a, c, g, or t
gaanacccaaaattgngctngtgggcaaannttttnccgtttcttgtgcttgngcggcnaagnnaaaaattcaaaaccaanaccacanaagcgcgttatcctgnctntctgccnttnccctgtcacactgnggctgtacagacatcnancgctttctagagagacgngagagtcaggggactctttcccccanncgcattatanccacatattagngtannanattcagctgtgntncactgggngtgtctccntagtgtgaagcaacacagggaaactnttcgcncacatgtcctctggtgttcacaganataagnaggctcctagaccnntatnactgtgggnagagnatgttacctccctatanntcggggtctatctctgtgaganagagnttcctttctcccatncctacctcagtggggtgntatntacatcncagagagcaganaactgtgagc

SEQ ID NO: 83 - DNA, 367 bp, Artificial Sequence
  Description of Artificial Sequence: Note: = synthetic construct
  misc_feature (6)..(6): n is a, c, g, or t
  misc_feature (16)..(16): n is a, c, g, or t
  misc_feature (25)..(25): n is a, c, g, or t
  misc_feature (33)..(33): n is a, c, g, or t
  misc_feature (38)..(38): n is a, c, g, or t
  misc_feature (42)..(42): n is a, c, g, or t
  misc_feature (44)..(45): n is a, c, g, or t
  misc_feature (56)..(57): n is a, c, g, or t
  misc_feature (60)..(60): n is a, c, g, or t
  misc_feature (73)..(73): n is a, c, g, or t
  misc_feature (97)..(97): n is a, c, g, or t
  misc_feature (120)..(120): n is a, c, g, or t
  misc_feature (126)..(126): n is a, c, g, or t
  misc_feature (131)..(132): n is a, c, g, or t
  misc_feature (135)..(135): n is a, c, g, or t
  misc_feature (149)..(152): n is a, c, g, or t
  misc_feature (154)..(154): n is a, c, g, or t
  misc_feature (156)..(156): n is a, c, g, or t
  misc_feature (160)..(160): n is a, c, g, or t
  misc_feature (167)..(167): n is a, c, g, or t
  misc_feature (170)..(170): n is a, c, g, or t
  misc_feature (173)..(174): n is a, c, g, or t
  misc_feature (183)..(183): n is a, c, g, or t
  misc_feature (186)..(187): n is a, c, g, or t
  misc_feature (189)..(189): n is a, c, g, or t
  misc_feature (199)..(199): n is a, c, g, or t
  misc_feature (208)..(210): n is a, c, g, or t
  misc_feature (221)..(221): n is a, c, g, or t
  misc_feature (224)..(224): n is a, c, g, or t
  misc_feature (237)..(237): n is a, c, g, or t
  misc_feature (241)..(241): n is a, c, g, or t
  misc_feature (246)..(246): n is a, c, g, or t
  misc_feature (270)..(270): n is a, c, g, or t
  misc_feature (283)..(285): n is a, c, g, or t
  misc_feature (287)..(287): n is a, c, g, or t
  misc_feature (289)..(289): n is a, c, g, or t
  misc_feature (299)..(299): n is a, c, g, or t
  misc_feature (306)..(306): n is a, c, g, or t
  misc_feature (312)..(312): n is a, c, g, or t
  misc_feature (325)..(325): n is a, c, g, or t
  misc_feature (337)..(337): n is a, c, g, or t
  misc_feature (343)..(343): n is a, c, g, or t
  misc_feature (346)..(346): n is a, c, g, or t
  misc_feature (352)..(352): n is a, c, g, or t
  misc_feature (359)..(359): n is a, c, g, or t
  misc_feature (362)..(362): n is a, c, g, or t
ggggtntcacagaganagggcacanctctcccnagaangggncnnccctctttttnnggngtaacacctctcnccgtgtctctttctttcttttttnttttttggggggctctttttcgnggaggnggagnncgnccgagggtcgggcnnnncngngganagctctntcncanngatatatcnccnnancccccctgtntcttataannnacatctcttcntcncagggtcacaccnagantctcntttctacaacaacccccacacgcnaaagctccccacnnngngngggggtctcncaagaanatctcngcggagaggtggnggagagagtganatctgnatntctggnttccccncantgccc

SEQ ID NO: 84 - DNA, 925 bp, Artificial Sequence
  Description of Artificial Sequence: Note: = synthetic construct
  misc_feature (12)..(12): n is a, c, g, or t
  misc_feature (15)..(15): n is a, c, g, or t
  misc_feature (32)..(32): n is a, c, g, or t
  misc_feature (44)..(44): n is a, c, g, or t
  misc_feature (46)..(46): n is a, c, g, or t
  misc_feature (49)..(49): n is a, c, g, or t
  misc_feature (53)..(54): n is a, c, g, or t
  misc_feature (57)..(57): n is a, c, g, or t
  misc_feature (63)..(63): n is a, c, g, or t
  misc_feature (70)..(70): n is a, c, g, or t
  misc_feature (78)..(78): n is a, c, g, or t
  misc_feature (80)..(80): n is a, c, g, or t
  misc_feature (84)..(84): n is a, c, g, or t
  misc_feature (89)..(89): n is a, c, g, or t
  misc_feature (95)..(95): n is a, c, g, or t
  misc_feature (105)..(105): n is a, c, g, or t
  misc_feature (116)..(116): n is a, c, g, or t
  misc_feature (118)..(118): n is a, c, g, or t
  misc_feature (141)..(141): n is a, c, g, or t
  misc_feature (151)..(151): n is a, c, g, or t
  misc_feature (163)..(163): n is a, c, g, or t
  misc_feature (183)..(183): n is a, c, g, or t
  misc_feature (199)..(199): n is a, c, g, or t
  misc_feature (205)..(205): n is a, c, g, or t
  misc_feature (223)..(223): n is a, c, g, or t
  misc_feature (236)..(237): n is a, c, g, or t
  misc_feature (265)..(265): n is a, c, g, or t
  misc_feature (276)..(276): n is a, c, g, or t
  misc_feature (280)..(280): n is a, c, g, or t
  misc_feature (301)..(301): n is a, c, g, or t
  misc_feature (320)..(320): n is a, c, g, or t
  misc_feature (337)..(337): n is a, c, g, or t
  misc_feature (384)..(384): n is a, c, g, or t
  misc_feature (400)..(400): n is a, c, g, or t
  misc_feature (407)..(407): n is a, c, g, or t
  misc_feature (924)..(924): n is a, c, g, or t
gggggaaaaccnggnaattgttttttgacganccaaaaaggggncnagnagcnnttntcctanatggggncgggatcntntccnagganagattnatggagtatnccttttttgcncnaaggttgattgctcttgaaaggntttgaggtgnaattcctccgtnagtttgaccgtagtcggatntgaagagggattgttnagcagncataatttcattccctgnacacccagtaacnntttaccgtcatttggttgggaattgatntcgggaggtancaanggccacagttatttattgttncggaggattgcaccaattnggccggctgcctctganatctgtttctcatccatgccggttcacccagacgaaagccgaaagcntcgggagtcctaactntagtccntgaaagtcattcccagctgcgtaattgggctgtgcagagtcccagctcggtaaatatttgccccgtgactgagctggagagaatgctcctttcttggtcctgggcagctcttggcagctcacatgcactgtttacctatcctcccacattcccccctgaggaatcatcgtgcctcggttcccttaagtcctctcaacagaaaacaaggcagagtggaacgaaggaaagtgcgtggccgttagaaagcctgtctcgaatctgtcccacgtgcctcaggtagcgttccaaacagcaaagattctagtgaagaaaaataccgtccggtcaattagtcaggtggacagagcaggacccggtgtcttggaagcctcgtccattcctctggggaaggtgggggggggcgtgtaatgcagctctcaagaagaaggtatttttgttttcctggagaaactgccatcccaggagctgagagtggatcagtaggaaggcctgtgacaggaagcagggaggttcagcng

SEQ ID NO: 85 - DNA, 554 bp, Artificial Sequence
  Description of Artificial Sequence: Note: = synthetic construct
  misc_feature (7)..(7): n is a, c, g, or t
  misc_feature (10)..(10): n is a, c, g, or t
  misc_feature (25)..(25): n is a, c, g, or t
  misc_feature (65)..(65): n is a, c, g, or t
  misc_feature (75)..(75): n is a, c, g, or t
  misc_feature (144)..(144): n is a, c, g, or t
  misc_feature (174)..(174): n is a, c, g, or t
  misc_feature (207)..(207): n is a, c, g, or t
  misc_feature (237)..(237): n is a, c, g, or t
  misc_feature (279)..(279): n is a, c, g, or t
  misc_feature (315)..(315): n is a, c, g, or t
  misc_feature (328)..(328): n is a, c, g, or t
  misc_feature (341)..(341): n is a, c, g, or t
  misc_feature (412)..(412): n is a, c, g, or t
  misc_feature (452)..(452): n is a, c, g, or t
  misc_feature (455)..(455): n is a, c, g, or t
  misc_feature (458)..(458): n is a, c, g, or t
  misc_feature (522)..(522): n is a, c, g, or t
  misc_feature (534)..(534): n is a, c, g, or t
caagatnganggggcggcggttcgnccagagagcgggtagggaagggaacgcgccggatgagccngggtgcgganagccagaccccaggcgtgggaaggggagagagatagagcggccggttgggaagaggaggaccgtggttnataaataacagaaagcccagagggacgtanccatccgggatggagagaggtagggaatccagntgtaagtcccaaactgccaccaccttcatnagaactgcttcgtgtaaggtcacgcaccgggccagctgtccngagtggcggtcctggcgtgttaagttagctaaagtnactgcaactccgnctgtgcagactgntcgtaaattctctctgtccgccaaattctccctcctattaaacttttcacttcctttcacttagtttcctnacttctttcaaacggaagctgtaactgagcctgccacccnganacnttgtggttgccatttttatgctaaagtaatcgtgttttttatgcctgtcaactcccttttcatntaaagcagggcntaccctattataactctgcc

SEQ ID NO: 86 - DNA, 891 bp, Artificial Sequence
  Description of Artificial Sequence: Note = Synthetic Construct
  misc_feature (3)..(3): n is a, c, g, or t
  misc_feature (8)..(8): n is a, c, g, or t
  misc_feature (18)..(18): n is a, c, g, or t
  misc_feature (25)..(25): n is a, c, g, or t
  misc_feature (27)..(27): n is a, c, g, or t
  misc_feature (31)..(31): n is a, c, g, or t
  misc_feature (48)..(48): n is a, c, g, or t
  misc_feature (70)..(70): n is a, c, g, or t
  misc_feature (83)..(83): n is a, c, g, or t
  misc_feature (114)..(114): n is a, c, g, or t
  misc_feature (119)..(119): n is a, c, g, or t
  misc_feature (121)..(121): n is a, c, g, or t
  misc_feature (126)..(126): n is a, c, g, or t
  misc_feature (141)..(141): n is a, c, g, or t
  misc_feature (150)..(150): n is a, c, g, or t
  misc_feature (156)..(156): n is a, c, g, or t
  misc_feature (164)..(164): n is a, c, g, or t
  misc_feature (168)..(168): n is a, c, g, or t
  misc_feature (171)..(171): n is a, c, g, or t
  misc_feature (182)..(183): n is a, c, g, or t
  misc_feature (198)..(198): n is a, c, g, or t
  misc_feature (201)..(201): n is a, c, g, or t
  misc_feature (205)..(205): n is a, c, g, or t
  misc_feature (212)..(212): n is a, c, g, or t
  misc_feature (226)..(226): n is a, c, g, or t
  misc_feature (241)..(242): n is a, c, g, or t
  misc_feature (246)..(246): n is a, c, g, or t
  misc_feature (248)..(248): n is a, c, g, or t
  misc_feature (302)..(302): n is a, c, g, or t
  misc_feature (316)..(316): n is a, c, g, or t
  misc_feature (343)..(343): n is a, c, g, or t
  misc_feature (349)..(349): n is a, c, g, or t
  misc_feature (360)..(360): n is a, c, g, or t
  misc_feature (371)..(372): n is a, c, g, or t
  misc_feature (387)..(387): n is a, c, g, or t
  misc_feature (394)..(394): n is a, c, g, or t
  misc_feature (397)..(398): n is a, c, g, or t
  misc_feature (423)..(423): n is a, c, g, or t
  misc_feature (425)..(425): n is a, c, g, or t
  misc_feature (449)..(449): n is a, c, g, or t
  misc_feature (460)..(460): n is a, c, g, or t
  misc_feature (472)..(472): n is a, c, g, or t
  misc_feature (512)..(512): n is a, c, g, or t
  misc_feature (600)..(600): n is a, c, g, or t
  misc_feature (651)..(651): n is a, c, g, or t
  misc_feature (679)..(679): n is a, c, g, or t
  misc_feature (695)..(695): n is a, c, g, or t
  misc_feature (731)..(731): n is a, c, g, or t
  misc_feature (772)..(772): n is a, c, g, or t
  misc_feature (805)..(805): n is a, c, g, or t
  misc_feature (862)..(862): n is a, c, g, or t
  misc_feature (875)..(875): n is a, c, g, or t
  misc_feature (878)..(878): n is a, c, g, or t
ttngaaanaatttccgtnaaggtcngnaatnggccccggaaaaaatgngttcctccccaccttcattggngcggatcctgccngggaggccaatggtttaacaaataatctttnggagntntggtnggggggggagggacncccacagantcatgnggtggttngggnggngggcatcgttnngatattatcacattntgngaanctatgtnggggcttcctttcngacaggtggtggttnnacangnggatgtgtgcttcttttttcagcagtggtggacccggattctaagacccttacngtaacaatgccctnttttcctaagcctaaccagtcctttangaggantgctcttgggnacccatgctgnntcacctagccttggntcacatnttnnacacaggaaaaggcagcatgtcttntnggagctcagcttattcccttcccntcccatccagnatctccctgggntggatgaggtggatgacgcatcttcaaagcaccccacgtntcatgggatgtgcacaggagcttcgttggaaatgtgttgcgcgaccaggcttgtgtaggaaacaacagactactcgaaattaaagtcntaccttgcagggttctcagaggcttttacgcattaataaacatttgaatcntaagaagggagcacagcatgtaatattnttcaaattatcaggcnttgcaaccttcattagtttctcttacgcagctgggngtggtggtgtgtacctttaatctcagcactgaggaggcacngatatctccatctctgtgacttccagaccggcntcgccagagcaagttccaggccacccagatgagatgctcacagaggggacctttttntgatgaccaacgnagnatgcaagtaagga

SEQ ID NO: 87 - DNA, 974 bp, Artificial Sequence
  Description of Artificial Sequence: Note = Synthetic Construct
  misc_feature (5)..(5): n is a, c, g, or t
  misc_feature (8)..(8): n is a, c, g, or t
  misc_feature (17)..(18): n is a, c, g, or t
  misc_feature (22)..(23): n is a, c, g, or t
  misc_feature (28)..(29): n is a, c, g, or t
  misc_feature (37)..(37): n is a, c, g, or t
  misc_feature (39)..(39): n is a, c, g, or t
  misc_feature (45)..(46): n is a, c, g, or t
  misc_feature (55)..(55): n is a, c, g, or t
  misc_feature (69)..(69): n is a, c, g, or t
  misc_feature (80)..(82): n is a, c, g, or t
  misc_feature (88)..(88): n is a, c, g, or t
  misc_feature (94)..(95): n is a, c, g, or t
  misc_feature (97)..(97): n is a, c, g, or t
  misc_feature (106)..(106): n is a, c, g, or t
  misc_feature (112)..(112): n is a, c, g, or t
  misc_feature (116)..(116): n is a, c, g, or t
  misc_feature (120)..(121): n is a, c, g, or t
  misc_feature (131)..(131): n is a, c, g, or t
  misc_feature (133)..(133): n is a, c, g, or t
  misc_feature (147)..(147): n is a, c, g, or t
  misc_feature (152)..(152): n is a, c, g, or t
  misc_feature (164)..(164): n is a, c, g, or t
  misc_feature (169)..(169): n is a, c, g, or t
  misc_feature (171)..(171): n is a, c, g, or t
  misc_feature (175)..(175): n is a, c, g, or t
  misc_feature (177)..(177): n is a, c, g, or t
  misc_feature (179)..(179): n is a, c, g, or t
  misc_feature (187)..(187): n is a, c, g, or t
  misc_feature (194)..(194): n is a, c, g, or t
  misc_feature (212)..(212): n is a, c, g, or t
  misc_feature (220)..(221): n is a, c, g, or t
  misc_feature (230)..(231): n is a, c, g, or t
  misc_feature (234)..(234): n is a, c, g, or t
  misc_feature (247)..(247): n is a, c, g, or t
  misc_feature (254)..(254): n is a, c, g, or t
  misc_feature (256)..(256): n is a, c, g, or t
  misc_feature (258)..(258): n is a, c, g, or t
  misc_feature (261)..(262): n is a, c, g, or t
  misc_feature (266)..(266): n is a, c, g, or t
  misc_feature (268)..(268): n is a, c, g, or t
  misc_feature (271)..(271): n is a, c, g, or t
  misc_feature (274)..(274): n is a, c, g, or t
  misc_feature (288)..(288): n is a, c, g, or t
  misc_feature (294)..(294): n is a, c, g, or t
  misc_feature (310)..(310): n is a, c, g, or t
  misc_feature (325)..(325): n is a, c, g, or t
  misc_feature (329)..(329): n is a, c, g, or t
  misc_feature (337)..(337): n is a, c, g, or t
  misc_feature (342)..(342): n is a, c, g, or t
  misc_feature (349)..(349): n is a, c, g, or t
  misc_feature (353)..(353): n is a, c, g, or t
  misc_feature (356)..(357): n is a, c, g, or t
  misc_feature (359)..(359): n is a, c, g, or t
  misc_feature (363)..(363): n is a, c, g, or t
  misc_feature (365)..(365): n is a, c, g, or t
  misc_feature (368)..(368): n is a, c, g, or t
  misc_feature (370)..(370): n is a, c, g, or t
  misc_feature (397)..(397): n is a, c, g, or t
  misc_feature (399)..(399): n is a, c, g, or t
  misc_feature (401)..(401): n is a, c, g, or t
  misc_feature (406)..(406): n is a, c, g, or t
  misc_feature (412)..(412): n is a, c, g, or t
  misc_feature (414)..(414): n is a, c, g, or t
  misc_feature (416)..(416): n is a, c, g, or t
  misc_feature (432)..(432): n is a, c, g, or t
  misc_feature (449)..(449): n is a, c, g, or t
  misc_feature (454)..(455): n is a, c, g, or t
  misc_feature (460)..(460): n is a, c, g, or t
  misc_feature (462)..(462): n is a, c, g, or t
  misc_feature (470)..(470): n is a, c, g, or t
  misc_feature (478)..(478): n is a, c, g, or t
  misc_feature (497)..(497): n is a, c, g, or t
  misc_feature (507)..(507): n is a, c, g, or t
  misc_feature (520)..(520): n is a, c, g, or t
  misc_feature (523)..(523): n is a, c, g, or t
  misc_feature (589)..(590): n is a, c, g, or t
  misc_feature (646)..(646): n is a, c, g, or t
  misc_feature (656)..(656): n is a, c, g, or t
  misc_feature (658)..(658): n is a, c, g, or t
  misc_feature (683)..(683): n is a, c, g, or t
  misc_feature (692)..(692): n is a, c, g, or t
  misc_feature (768)..(768): n is a, c, g, or t
  misc_feature (918)..(918): n is a, c, g, or t
  misc_feature (943)..(943): n is a, c, g, or t
  misc_feature (948)..(948): n is a, c, g, or t
  misc_feature (951)..(952): n is a, c, g, or t
  misc_feature (954)..(955): n is a, c, g, or t
  misc_feature (959)..(959): n is a, c, g, or t
  misc_feature (964)..(966): n is a, c, g, or t
aaaanaanatattccgnntctnntagcnnagaagttntncgagcnntcccccgtntttttaaaaacccncggattccggnnntcgggntttaanngnttttttaanggcccnaagncccnnttattgccgncntttcccccccgctnttgcncccctttacttngagantngtgntncnaagatttnaaggttnttgcccccccggcttttnttcccctnnttttccccnnagntttaaaaccggtntgggttncnanttnnttgnanccnccnattggggtttccgnttaccngggtttttccccatgnccgttccctccaatnttgnacttcccnggtcngggtccnaatnccnngnaacngntcnanccttattgacaattaatttttccttgngnantctgncccccngnantttggggttcttgggngcagggcctttttttcnttggnngcaancncataaatnttaccagnttgattgctaaggaagtanccatggttgngaacccccccttnttntctcccagatggaacccaggattttggaactgcagaggcttcagggtcttgggaagcggaggcagnnaaagattggagtgcactgtccttttgcaatatggggtttgcctgcctgctggctcntctcctgctntntcagatggtgactgaggctacttcngcaggactnggaataatcatgtccaggtggctgcccttccgagcagaaagggacagacgtggggcgatgaagttgctatcgtttntttttttttctgcacagactgcaaagtgtgcagagggagggaggctgtgcaaaaaaaaaaaaaaaaaaaaaaaaaaaaaaaaccgaggacgcagaagttagactgctgacccatttggtgcatgtgtgcccatggagggaggggaccttntttaaagggttcacgcggcacgcantgggnaanngnncctntacgnnnctcccaga

SEQ ID NO: 88 - DNA, 850 bp, Artificial Sequence
  Description of Artificial Sequence: Note = Synthetic Construct
  misc_feature (2)..(2): n is a, c, g, or t
  misc_feature (15)..(15): n is a, c, g, or t
  misc_feature (19)..(19): n is a, c, g, or t
  misc_feature (21)..(21): n is a, c, g, or t
  misc_feature (47)..(48): n is a, c, g, or t
  misc_feature (52)..(52): n is a, c, g, or t
  misc_feature (63)..(63): n is a, c, g, or t
  misc_feature (68)..(68): n is a, c, g, or t
  misc_feature (73)..(73): n is a, c, g, or t
  misc_feature (80)..(80): n is a, c, g, or t
  misc_feature (87)..(87): n is a, c, g, or t
  misc_feature (90)..(90): n is a, c, g, or t
  misc_feature (117)..(117): n is a, c, g, or t
  misc_feature (119)..(119): n is a, c, g, or t
  misc_feature (135)..(136): n is a, c, g, or t
  misc_feature (153)..(154): n is a, c, g, or t
  misc_feature (156)..(156): n is a, c, g, or t
  misc_feature (181)..(181): n is a, c, g, or t
  misc_feature (189)..(189): n is a, c, g, or t
  misc_feature (193)..(195): n is a, c, g, or t
  misc_feature (207)..(207): n is a, c, g, or t
  misc_feature (218)..(219): n is a, c, g, or t
  misc_feature (248)..(248): n is a, c, g, or t
  misc_feature (258)..(258): n is a, c, g, or t
  misc_feature (268)..(268): n is a, c, g, or t
  misc_feature (271)..(271): n is a, c, g, or t
  misc_feature (273)..(273): n is a, c, g, or t
  misc_feature (282)..(282): n is a, c, g, or t
  misc_feature (291)..(291): n is a, c, g, or t
  misc_feature (298)..(298): n is a, c, g, or t
  misc_feature (304)..(304): n is a, c, g, or t
  misc_feature (311)..(311): n is a, c, g, or t
  misc_feature (313)..(313): n is a, c, g, or t
  misc_feature (318)..(318): n is a, c, g, or t
  misc_feature (323)..(323): n is a, c, g, or t
  misc_feature (325)..(325): n is a, c, g, or t
  misc_feature (328)..(328): n is a, c, g, or t
  misc_feature (340)..(340): n is a, c, g, or t
  misc_feature (346)..(346): n is a, c, g, or t
  misc_feature (357)..(357): n is a, c, g, or t
  misc_feature (362)..(362): n is a, c, g, or t
  misc_feature (369)..(369): n is a, c, g, or t
  misc_feature (373)..(373): n is a, c, g, or t
  misc_feature (383)..(383): n is a, c, g, or t
  misc_feature (385)..(385): n is a, c, g, or t
  misc_feature (387)..(387): n is a, c, g, or t
  misc_feature (393)..(393): n is a, c, g, or t
  misc_feature (401)..(401): n is a, c, g, or t
  misc_feature (412)..(412): n is a, c, g, or t
  misc_feature (415)..(415): n is a, c, g, or t
  misc_feature (421)..(421): n is a, c, g, or t
  misc_feature (425)..(425): n is a, c, g, or t
  misc_feature (427)..(427): n is a, c, g, or t
  misc_feature (429)..(429): n is a, c, g, or t
  misc_feature (434)..(434): n is a, c, g, or t
  misc_feature (441)..(441): n is a, c, g, or t
  misc_feature (444)..(444): n is a, c, g, or t
  misc_feature (446)..(447): n is a, c, g, or t
  misc_feature (450)..(451): n is a, c, g, or t
  misc_feature (463)..(464): n is a, c, g, or t
  misc_feature (469)..(469): n is a, c, g, or t
  misc_feature (473)..(473): n is a, c, g, or t
  misc_feature (476)..(476): n is a, c, g, or t
  misc_feature (481)..(481): n is a, c, g, or t
  misc_feature (483)..(483): n is a, c, g, or t
  misc_feature (503)..(503): n is a, c, g, or t
  misc_feature (518)..(518): n is a, c, g, or t
  misc_feature (534)..(535): n is a, c, g, or t
  misc_feature (541)..(541): n is a, c, g, or t
  misc_feature (547)..(547): n is a, c, g, or t
  misc_feature (549)..(549): n is a, c, g, or t
  misc_feature (552)..(552): n is a, c, g, or t
  misc_feature (555)..(555): n is a, c, g, or t
  misc_feature (567)..(567): n is a, c, g, or t
  misc_feature (574)..(574): n is a, c, g, or t
  misc_feature (577)..(577): n is a, c, g, or t
  misc_feature (581)..(581): n is a, c, g, or t
  misc_feature (587)..(591): n is a, c, g, or t
  misc_feature (614)..(614): n is a, c, g, or t
  misc_feature (629)..(629): n is a, c, g, or t
  misc_feature (635)..(636): n is a, c, g, or t
  misc_feature (646)..(646): n is a, c, g, or t
  misc_feature (660)..(660): n is a, c, g, or t
  misc_feature (664)..(664): n is a, c, g, or t
  misc_feature (667)..(667): n is a, c, g, or t
  misc_feature (676)..(676): n is a, c, g, or t
  misc_feature (680)..(680): n is a, c, g, or t
  misc_feature (682)..(682): n is a, c, g, or t
  misc_feature (687)..(687): n is a, c, g, or t
  misc_feature (701)..(701): n is a, c, g, or t
  misc_feature (711)..(711): n is a, c, g, or t
  misc_feature (723)..(723): n is a, c, g, or t
  misc_feature (733)..(733): n is a, c, g, or t
  misc_feature (738)..(738): n is a, c, g, or t
  misc_feature (758)..(758): n is a, c, g, or t
  misc_feature (771)..(772): n is a, c, g, or t
  misc_feature (788)..(788): n is a, c, g, or t
  misc_feature (791)..(791): n is a, c, g, or t
  misc_feature (799)..(799): n is a, c, g, or t
  misc_feature (809)..(809): n is a, c, g, or t
  misc_feature (818)..(818): n is a, c, g, or t
  misc_feature (839)..(839): n is a, c, g, or t
  misc_feature (845)..(845): n is a, c, g, or t
  misc_feature (849)..(849): n is a, c, g, or t
anttttccctcaagnaaantntggtttgggcaacttgaagacgcttnnaccnaaaacccttgnggagnttggngaccttnttaccgnaangagtgggaaacgttttcctccgggttnanggttagggggacccgnnggaaaattttaaaaccnngngggctttttcgaattaaggggaaangcggtttnggtnnntgaagggcgggnggttggagtcnnagtccagagttgatttccacccacaaatntgggaggtgncggggaatgntgncnttttcttgngatgagggntgccgtnccggantaacagngnttgcnttgtntngcnaaacgaagagtntcctgnttggaataggngttcngttcgangganccagatttangngntggagnaaggattnggcagataaangcntgaganatgnancntggancaggtcnggncnnagnntacagatgatgnncccanacanganataantncagatcacagtcgtacccgnggctgggccatgaanagggcatccccagacnnacacangccttnanaantgntcagagaaccancagtggntangggntgcccnnnnnaccagggaagacccggggcgtgncggatattgacacancagatnncatttggggncggttcgagggttnatgntcnccgagtacnaganangatcntccaacccggaatncggtgctccngtcgtccgatgnaatgagtcgnccggnaacctcatatccaagaaacnatacagcagtggnntccgagtctcgtatantcnttgcgggnggaggctatnttcagaggncaagattaccgttagcggganaaagtngaana

SEQ ID NO: 89 - DNA, 531 bp, Artificial Sequence
  Description of Artificial Sequence: Note = Synthetic Construct
  misc_feature (4)..(4): n is a, c, g, or t
  misc_feature (8)..(8): n is a, c, g, or t
  misc_feature (21)..(21): n is a, c, g, or t
  misc_feature (25)..(25): n is a, c, g, or t
  misc_feature (27)..(27): n is a, c, g, or t
  misc_feature (30)..(30): n is a, c, g, or t
  misc_feature (36)..(36): n is a, c, g, or t
  misc_feature (38)..(38): n is a, c, g, or t
  misc_feature (58)..(59): n is a, c, g, or t
  misc_feature (61)..(61): n is a, c, g, or t
  misc_feature (66)..(67): n is a, c, g, or t
  misc_feature (77)..(77): n is a, c, g, or t
  misc_feature (90)..(90): n is a, c, g, or t
  misc_feature (101)..(101): n is a, c, g, or t
  misc_feature (122)..(122): n is a, c, g, or t
  misc_feature (124)..(124): n is a, c, g, or t
  misc_feature (140)..(140): n is a, c, g, or t
  misc_feature (142)..(142): n is a, c, g, or t
  misc_feature (166)..(166): n is a, c, g, or t
  misc_feature (169)..(169): n is a, c, g, or t
  misc_feature (189)..(189): n is a, c, g, or t
  misc_feature (192)..(192): n is a, c, g, or t
  misc_feature (215)..(216): n is a, c, g, or t
  misc_feature (227)..(227): n is a, c, g, or t
  misc_feature (238)..(238): n is a, c, g, or t
  misc_feature (246)..(246): n is a, c, g, or t
  misc_feature (266)..(266): n is a, c, g, or t
  misc_feature (269)..(269): n is a, c, g, or t
  misc_feature (277)..(277): n is a, c, g, or t
  misc_feature (280)..(280): n is a, c, g, or t
  misc_feature (284)..(284): n is a, c, g, or t
  misc_feature (324)..(324): n is a, c, g, or t
  misc_feature (343)..(343): n is a, c, g, or t
  misc_feature (351)..(351): n is a, c, g, or t
  misc_feature (359)..(359): n is a, c, g, or t
  misc_feature (362)..(363): n is a, c, g, or t
  misc_feature (367)..(367): n is a, c, g, or t
  misc_feature (371)..(371): n is a, c, g, or t
  misc_feature (376)..(376): n is a, c, g, or t
  misc_feature (399)..(399): n is a, c, g, or t
  misc_feature (402)..(402): n is a, c, g, or t
  misc_feature (405)..(405): n is a, c, g, or t
  misc_feature (407)..(407): n is a, c, g, or t
  misc_feature (409)..(410): n is a, c, g, or t
  misc_feature (414)..(415): n is a, c, g, or t
  misc_feature (423)..(424): n is a, c, g, or t
  misc_feature (436)..(436): n is a, c, g, or t
  misc_feature (438)..(439): n is a, c, g, or t
  misc_feature (444)..(444): n is a, c, g, or t
  misc_feature (455)..(455): n is a, c, g, or t
  misc_feature (458)..(458): n is a, c, g, or t
  misc_feature (462)..(462): n is a, c, g, or t
  misc_feature (465)..(465): n is a, c, g, or t
  misc_feature (469)..(469): n is a, c, g, or t
  misc_feature (478)..(478): n is a, c, g, or t
  misc_feature (492)..(493): n is a, c, g, or t
  misc_feature (499)..(499): n is a, c, g, or t
  misc_feature (501)..(503): n is a, c, g, or t
  misc_feature (519)..(519): n is a, c, g, or t
  misc_feature (527)..(527): n is a, c, g, or t
ttgnggcngggtctcctctgngtgngngtntccccnanagggggggtctcacagtgtnngngtctnntgtctgtgtngtgcccctgtccncatctctcacnccagggagagagatgtgagananacatcagagatctctngnacagtgtttcacaagagtctatcncanagagcacatctgcccggggnganacacaactctaaatgtgtctcanntgatctctctnttgtgtctctnacatatgnggacatgctctcagagtatnggntctcttgngcncttntgcacacacacacacacacacacacacacacacacacacncttctctctggcacagggntatggcanagcacatnttnngagntcanagctntatatgagtgtgtggcgaaaggngtnatnananngacnnccccagcnnatataggggggngnnctctngggctctcttnggnaatntgngggngagtctgcncacacaggcgctcnnacccancnnnttggggccccccaggngtttttcncccc

SEQ ID NO: 90 - DNA, 572 bp, Artificial Sequence
  Description of Artificial Sequence: Note = Synthetic Construct
  misc_feature (6)..(6): n is a, c, g, or t
  misc_feature (26)..(26): n is a, c, g, or t
  misc_feature (30)..(30): n is a, c, g, or t
  misc_feature (35)..(35): n is a, c, g, or t
  misc_feature (37)..(37): n is a, c, g, or t
  misc_feature (41)..(41): n is a, c, g, or t
  misc_feature (67)..(67): n is a, c, g, or t
  misc_feature (71)..(72): n is a, c, g, or t
  misc_feature (87)..(87): n is a, c, g, or t
  misc_feature (89)..(90): n is a, c, g, or t
  misc_feature (96)..(96): n is a, c, g, or t
  misc_feature (111)..(111): n is a, c, g, or t
  misc_feature (115)..(115): n is a, c, g, or t
  misc_feature (117)..(117): n is a, c, g, or t
  misc_feature (125)..(125): n is a, c, g, or t
  misc_feature (131)..(131): n is a, c, g, or t
  misc_feature (135)..(135): n is a, c, g, or t
  misc_feature (161)..(161): n is a, c, g, or t
  misc_feature (167)..(167): n is a, c, g, or t
  misc_feature (177)..(177): n is a, c, g, or t
  misc_feature (189)..(189): n is a, c, g, or t
  misc_feature (196)..(196): n is a, c, g, or t
  misc_feature (201)..(201): n is a, c, g, or t
  misc_feature (213)..(213): n is a, c, g, or t
  misc_feature (222)..(222): n is a, c, g, or t
  misc_feature (255)..(255): n is a, c, g, or t
  misc_feature (258)..(258): n is a, c, g, or t
  misc_feature (264)..(264): n is a, c, g, or t
  misc_feature (278)..(278): n is a, c, g, or t
  misc_feature (280)..(280): n is a, c, g, or t
  misc_feature (283)..(283): n is a, c, g, or t
  misc_feature (293)..(293): n is a, c, g, or t
  misc_feature (300)..(300): n is a, c, g, or t
  misc_feature (309)..(309): n is a, c, g, or t
  misc_feature (321)..(321): n is a, c, g, or t
  misc_feature (328)..(328): n is a, c, g, or t
  misc_feature (337)..(337): n is a, c, g, or t
  misc_feature (339)..(339): n is a, c, g, or t
  misc_feature (347)..(347): n is a, c, g, or t
  misc_feature (351)..(351): n is a, c, g, or t
  misc_feature (375)..(375): n is a, c, g, or t
  misc_feature (381)..(381): n is a, c, g, or t
  misc_feature (385)..(385): n is a, c, g, or t
  misc_feature (392)..(392): n is a, c, g, or t
  misc_feature (395)..(395): n is a, c, g, or t
  misc_feature (399)..(400): n is a, c, g, or t
  misc_feature (405)..(405): n is a, c, g, or t
  misc_feature (408)..(408): n is a, c, g, or t
  misc_feature (411)..(411): n is a, c, g, or t
  misc_feature (422)..(422): n is a, c, g, or t
  misc_feature (427)..(427): n is a, c, g, or t
  misc_feature (433)..(434): n is a, c, g, or t
  misc_feature (436)..(436): n is a, c, g, or t
  misc_feature (443)..(443): n is a, c, g, or t
  misc_feature (447)..(447): n is a, c, g, or t
  misc_feature (468)..(468): n is a, c, g, or t
  misc_feature (480)..(480): n is a, c, g, or t
  misc_feature (484)..(484): n is a, c, g, or t
  misc_feature (496)..(496): n is a, c, g, or t
  misc_feature (498)..(499): n is a, c, g, or t
  misc_feature (501)..(501): n is a, c, g, or t
  misc_feature (512)..(512): n is a, c, g, or t
  misc_feature (517)..(518): n is a, c, g, or t
  misc_feature (528)..(528): n is a, c, g, or t
  misc_feature (542)..(542): n is a, c, g, or t
  misc_feature (546)..(546): n is a, c, g, or t
  misc_feature (549)..(549): n is a, c, g, or t
  misc_feature (552)..(553): n is a, c, g, or t
  misc_feature (558)..(558): n is a, c, g, or t
  misc_feature (560)..(560): n is a, c, g, or t
  misc_feature (567)..(567): n is a, c, g, or t
  misc_feature (571)..(571): n is a, c, g, or t
tttttntgtggccctttaaactctgngtgnccgtntncccnagagggggggtctcacaaggagacancggnnacacagaggttttgngnntattgngagtctctgcgcacnccanantttaaccncggggnctcntgttttattttaaaaaaaaagagtcncatgtntatttctctnatgtgaaaatcncattcanagttntggggtttcccntgaggaganatagagtttcacactcttctctccgaggggtcntcncatgtntctccccaatgtgngnggnacacacatgnggccccnagggggtgngctctctctgcncagggcnccccccaanangtagaganacantgtggtgtttcacaacacaattcncgaganattntgttccncantggnngtctnagntcncatgttgtggngacangttagnncnccccatnttcncccccctttcacactgccccnagagagagaaantctnggccccctctananntntttttaaatcnccccnnaccacaggtnttcccagggtatgngacntcnccnnccccncnaaagatntgcnc

SEQ ID NO: 91 - DNA, 906 bp, Artificial Sequence
  Description of Artificial Sequence: Note = Synthetic Construct
  misc_feature (24)..(24): n is a, c, g, or t
  misc_feature (28)..(28): n is a, c, g, or t
  misc_feature (38)..(38): n is a, c, g, or t
  misc_feature (45)..(45): n is a, c, g, or t
  misc_feature (49)..(49): n is a, c, g, or t
  misc_feature (53)..(53): n is a, c, g, or t
  misc_feature (58)..(58): n is a, c, g, or t
  misc_feature (68)..(68): n is a, c, g, or t
  misc_feature (76)..(77): n is a, c, g, or t
  misc_feature (79)..(79): n is a, c, g, or t
  misc_feature (81)..(81): n is a, c, g, or t
  misc_feature (92)..(92): n is a, c, g, or t
  misc_feature (94)..(94): n is a, c, g, or t
  misc_feature (97)..(97): n is a, c, g, or t
  misc_feature (102)..(102): n is a, c, g, or t
  misc_feature (107)..(107): n is a, c, g, or t
  misc_feature (109)..(109): n is a, c, g, or t
  misc_feature (136)..(136): n is a, c, g, or t
  misc_feature (142)..(142): n is a, c, g, or t
  misc_feature (150)..(150): n is a, c, g, or t
  misc_feature (167)..(167): n is a, c, g, or t
  misc_feature (172)..(172): n is a, c, g, or t
  misc_feature (175)..(175): n is a, c, g, or t
  misc_feature (183)..(183): n is a, c, g, or t
  misc_feature (185)..(185): n is a, c, g, or t
  misc_feature (204)..(204): n is a, c, g, or t
  misc_feature (207)..(207): n is a, c, g, or t
  misc_feature (209)..(209): n is a, c, g, or t
  misc_feature (215)..(215): n is a, c, g, or t
  misc_feature (218)..(218): n is a, c, g, or t
  misc_feature (224)..(226): n is a, c, g, or t
  misc_feature (228)..(228): n is a, c, g, or t
  misc_feature (230)..(231): n is a, c, g, or t
  misc_feature (235)..(235): n is a, c, g, or t
  misc_feature (239)..(239): n is a, c, g, or t
  misc_feature (245)..(245): n is a, c, g, or t
  misc_feature (247)..(248): n is a, c, g, or t
  misc_feature (252)..(253): n is a, c, g, or t
  misc_feature (255)..(255): n is a, c, g, or t
  misc_feature (257)..(257): n is a, c, g, or t
  misc_feature (263)..(263): n is a, c, g, or t
  misc_feature (272)..(272): n is a, c, g, or t
  misc_feature (287)..(287): n is a, c, g, or t
  misc_feature (295)..(295): n is a, c, g, or t
  misc_feature (298)..(298): n is a, c, g, or t
  misc_feature (303)..(303): n is a, c, g, or t
  misc_feature (305)..(305): n is a, c, g, or t
  misc_feature (312)..(312): n is a, c, g, or t
  misc_feature (323)..(323): n is a, c, g, or t
  misc_feature (336)..(336): n is a, c, g, or t
  misc_feature (356)..(357): n is a, c, g, or t
  misc_feature (371)..(371): n is a, c, g, or t
  misc_feature (379)..(379): n is a, c, g, or t
  misc_feature (392)..(393): n is a, c, g, or t
  misc_feature (399)..(399): n is a, c, g, or t
  misc_feature (403)..(403): n is a, c, g, or t
  misc_feature (417)..(417): n is a, c, g, or t
  misc_feature (426)..(426): n is a, c, g, or t
  misc_feature (435)..(435): n is a, c, g, or t
  misc_feature (448)..(448): n is a, c, g, or t
  misc_feature (456)..(457): n is a, c, g, or t
  misc_feature (486)..(486): n is a, c, g, or t
  misc_feature (492)..(492): n is a, c, g, or t
  misc_feature (496)..(496): n is a, c, g, or t
  misc_feature (502)..(502): n is a, c, g, or t
  misc_feature (512)..(512): n is a, c, g, or t
  misc_feature (517)..(517): n is a, c, g, or t
  misc_feature (519)..(519): n is a, c, g, or t
  misc_feature (525)..(526): n is a, c, g, or t
  misc_feature (546)..(546): n is a, c, g, or t
  misc_feature (552)..(552): n is a, c, g, or t
  misc_feature (554)..(554): n is a, c, g, or t
  misc_feature (562)..(562): n is a, c, g, or t
  misc_feature (568)..(568): n is a, c, g, or t
  misc_feature (574)..(574): n is a, c, g, or t
  misc_feature (584)..(584): n is a, c, g, or t
  misc_feature (587)..(587): n is a, c, g, or t
  misc_feature (606)..(606): n is a, c, g, or t
  misc_feature (608)..(608): n is a, c, g, or t
  misc_feature (617)..(617): n is a, c, g, or t
  misc_feature (619)..(619): n is a, c, g, or t
  misc_feature (628)..(628): n is a, c, g, or t
  misc_feature (636)..(636): n is a, c, g, or t
  misc_feature (641)..(641): n is a, c, g, or t
  misc_feature (646)..(646): n is a, c, g, or t
  misc_feature (652)..(652): n is a, c, g, or t
  misc_feature (664)..(665): n is a, c, g, or t
  misc_feature (668)..(668): n is a, c, g, or t
  misc_feature (671)..(671): n is a, c, g, or t
  misc_feature (674)..(674): n is a, c, g, or t
  misc_feature (678)..(678): n is a, c, g, or t
  misc_feature (684)..(684): n is a, c, g, or t
  misc_feature (696)..(697): n is a, c, g, or t
  misc_feature (700)..(700): n is a, c, g, or t
  misc_feature (703)..(703): n is a, c, g, or t
  misc_feature (711)..(711): n is a, c, g, or t
  misc_feature (716)..(716): n is a, c, g, or t
  misc_feature (719)..(719): n is a, c, g, or t
  misc_feature (724)..(724): n is a, c, g, or t
  misc_feature (727)..(727): n is a, c, g, or t
  misc_feature (729)..(729): n is a, c, g, or t
  misc_feature (750)..(751): n is a, c, g, or t
  misc_feature (763)..(763): n is a, c, g, or t
  misc_feature (776)..(776): n is a, c, g, or t
  misc_feature (793)..(793): n is a, c, g, or t
  misc_feature (805)..(806): n is a, c, g, or t
  misc_feature (825)..(825): n is a, c, g, or t
  misc_feature (848)..(848): n is a, c, g, or t
  misc_feature (853)..(853): n is a, c, g, or t
  misc_feature (861)..(861): n is a, c, g, or t
  misc_feature (874)..(874): n is a, c, g, or t
  misc_feature (900)..(901): n is a, c, g, or t
tgggagtctctctcatatggcgcnttcnccaaaggggngtctctntccngagncgcanacgcgagaanactctgtnnantngtctccccccncnccnacagngtganantcaaaacctctagagccccccagaaancccctntctcaaanaaagagaaagagaagancgagnagnagagagananagagagagagagtgtgganctntntcctcnganccccannnananngtgnggcncactcncnngtgnngngnaccccnggggatttncgcgtgtccccttgngctctgtntangagananatatgtntagtctctctntcgccccctccgntgtcacgtgtgcggggcccnngagacacagacacntctctcanggggaacacatanngactcncacntgtgtttatattcncccctcccnctcacacanacacacacacagnagatattnngctactctctctctgtcacaggggtacanatttantctnggccanacccctctcngaagngngggcanngtaaaccccgccccctctcngagaangngagggcgntttacnttcccngtggcgtgtncgngcccccgagactccccttngnacccccctntnaaccctctntttgaacncaacncaccntccccnttttctcggggnnggnccngcncccnctctcncaaaaaaaattnnaanttngtcccctnccccnttntttcnggnanaaaccgtgtccggggggggannactcttttttgnccttaaaatcaanttttttccccttttccnggggacccccgnnttcctttttaaaaaaaaanaaccctttctcccttttaaaagnacccnttttttcnaaaaccgttccgnatttaattcctaaattcccttccccnncccgg

SEQ ID NO: 92 - DNA, 914 bp, Artificial Sequence
  Description of Artificial Sequence: Note = Synthetic Construct
  misc_feature (7)..(7): n is a, c, g, or t
  misc_feature (31)..(31): n is a, c, g, or t
  misc_feature (37)..(37): n is a, c, g, or t
  misc_feature (55)..(55): n is a, c, g, or t
  misc_feature (59)..(59): n is a, c, g, or t
  misc_feature (74)..(74): n is a, c, g, or t
  misc_feature (76)..(76): n is a, c, g, or t
  misc_feature (78)..(78): n is a, c, g, or t
  misc_feature (80)..(80): n is a, c, g, or t
  misc_feature (89)..(89): n is a, c, g, or t
  misc_feature (94)..(94): n is a, c, g, or t
  misc_feature (101)..(101): n is a, c, g, or t
  misc_feature (108)..(108): n is a, c, g, or t
  misc_feature (111)..(111): n is a, c, g, or t
  misc_feature (114)..(114): n is a, c, g, or t
  misc_feature (116)..(116): n is a, c, g, or t
  misc_feature (126)..(126): n is a, c, g, or t
  misc_feature (128)..(128): n is a, c, g, or t
  misc_feature (139)..(139): n is a, c, g, or t
  misc_feature (142)..(142): n is a, c, g, or t
  misc_feature (152)..(152): n is a, c, g, or t
  misc_feature (154)..(154): n is a, c, g, or t
  misc_feature (160)..(160): n is a, c, g, or t
  misc_feature (172)..(172): n is a, c, g, or t
  misc_feature (187)..(188): n is a, c, g, or t
  misc_feature (190)..(191): n is a, c, g, or t
  misc_feature (197)..(197): n is a, c, g, or t
  misc_feature (205)..(206): n is a, c, g, or t
  misc_feature (212)..(212): n is a, c, g, or t
  misc_feature (226)..(226): n is a, c, g, or t
  misc_feature (248)..(248): n is a, c, g, or t
  misc_feature (255)..(255): n is a, c, g, or t
  misc_feature (279)..(279): n is a, c, g, or t
  misc_feature (285)..(285): n is a, c, g, or t
  misc_feature (287)..(287): n is a, c, g, or t
  misc_feature (297)..(297): n is a, c, g, or t
  misc_feature (301)..(301): n is a, c, g, or t
  misc_feature (317)..(317): n is a, c, g, or t
  misc_feature (320)..(320): n is a, c, g, or t
  misc_feature (328)..(328): n is a, c, g, or t
  misc_feature (332)..(332): n is a, c, g, or t
  misc_feature (344)..(344): n is a, c, g, or t
  misc_feature (353)..(354): n is a, c, g, or t
  misc_feature (359)..(359): n is a, c, g, or t
  misc_feature (374)..(374): n is a, c, g, or t
  misc_feature (376)..(376): n is a, c, g, or t
  misc_feature (378)..(378): n is a, c, g, or t
  misc_feature (392)..(392): n is a, c, g, or t
  misc_feature (397)..(397): n is a, c, g, or t
  misc_feature (405)..(405): n is a, c, g, or t
  misc_feature (417)..(417): n is a, c, g, or t
  misc_feature (420)..(420): n is a, c, g, or t
  misc_feature (426)..(426): n is a, c, g, or t
  misc_feature (428)..(428): n is a, c, g, or t
  misc_feature (430)..(430): n is a, c, g, or t
  misc_feature (439)..(439): n is a, c, g, or t
  misc_feature (441)..(441): n is a, c, g, or t
  misc_feature (446)..(446): n is a, c, g, or t
  misc_feature (449)..(450): n is a, c, g, or t
  misc_feature (452)..(452): n is a, c, g, or t
  misc_feature (460)..(460): n is a, c, g, or t
  misc_feature (468)..(469): n is a, c, g, or t
  misc_feature (471)..(471): n is a, c, g, or t
  misc_feature (473)..(473): n is a, c, g, or t
  misc_feature (476)..(476): n is a, c, g, or t
  misc_feature (478)..(478): n is a, c, g, or t
  misc_feature (496)..(496): n is a, c, g, or t
  misc_feature (500)..(500): n is a, c, g, or t
  misc_feature (504)..(504): n is a, c, g, or t
  misc_feature (506)..(506): n is a, c, g, or t
  misc_feature (518)..(519): n is a, c, g, or t
  misc_feature (543)..(543): n is a, c, g, or t
  misc_feature (553)..(553): n is a, c, g, or t
  misc_feature (555)..(556): n is a, c, g, or t
  misc_feature (565)..(565): n is a, c, g, or t
  misc_feature (567)..(567): n is a, c, g, or t
  misc_feature (579)..(579): n is a, c, g, or t
  misc_feature (582)..(583): n is a, c, g, or t
  misc_feature (585)..(585): n is a, c, g, or t
  misc_feature (602)..(602): n is a, c, g, or t
  misc_feature (604)..(604): n is a, c, g, or t
  misc_feature (631)..(631): n is a, c, g, or t
  misc_feature (634)..(635): n is a, c, g, or t
  misc_feature (641)..(641): n is a, c, g, or t
  misc_feature (643)..(643): n is a, c, g, or t
  misc_feature (656)..(656): n is a, c, g, or t
  misc_feature (677)..(677): n is a, c, g, or t
  misc_feature (680)..(680): n is a, c, g, or t
  misc_feature (687)..(687): n is a, c, g, or t
  misc_feature (693)..(693): n is a, c, g, or t
  misc_feature (695)..(695): n is a, c, g, or t
  misc_feature (706)..(706): n is a, c, g, or t
  misc_feature (720)..(720): n is a, c, g, or t
  misc_feature (722)..(722): n is a, c, g, or t
  misc_feature (724)..(724): n is a, c, g, or t
  misc_feature (732)..(732): n is a, c, g, or t
  misc_feature (742)..(742): n is a, c, g, or t
  misc_feature (746)..(746): n is a, c, g, or t
  misc_feature (761)..(761): n is a, c, g, or t
  misc_feature (763)..(763): n is a, c, g, or t
  misc_feature (810)..(810): n is a, c, g, or t
  misc_feature (812)..(812): n is a, c, g, or t
  misc_feature (819)..(819): n is a, c, g, or t
  misc_feature (821)..(821): n is a, c, g, or t
  misc_feature (827)..(827): n is a, c, g, or t
  misc_feature (832)..(833): n is a, c, g, or t
  misc_feature (835)..(835): n is a, c, g, or t
  misc_feature (840)..(840): n is a, c, g, or t
  misc_feature (847)..(847): n is a, c, g, or t
  misc_feature (854)..(855): n is a, c, g, or t
  misc_feature (859)..(862): n is a, c, g, or t
  misc_feature (882)..(883): n is a, c, g, or t
  misc_feature (885)..(885): n is a, c, g, or t
  misc_feature (889)..(889): n is a, c, g, or t
  misc_feature (903)..(903): n is a, c, g, or t
gggatgngccctcagatcaatacacccctcngggggngtctctctctatctcccncagnagactcccatctctntntntncccccaganctggngaacggngtgtggnganccntntctgttctcnantctctaaaagngcnaaaagcgcananacacgngcctctctatanatctcacgtgtcccnngnnctctcngacccctnntctgtntgagagacaccctntctcaaaatatagtgtacacgngctttgnggctctccccttttctctccactnttgagngngaaacgcggngttntctctgagatgtaganagngtcccctnctcnatatatgtgttncccactccnnagggngtctcataaaaatcncntntctcaacaccaccncctcnaccccccncacgagaacacntcnccaccncnangacacaaananaaggngtnnanaaccccanaaaaactnngntntcngntttacacacacacacacncacnctcncncacacccccacnnaaatgggagaaaaaacagagaggngtgggtgttngnntcaacaccntnttacctctctgntgnnanttgagaaaatatttctntncttacccctctcccctctctgtgtgtngannatatcngntctagatgtcctnaccctccccaaacctttctcnggnagagacntctctntntttttcccccncttccatttgaaananangagaaggnccaaaaaggngggngtcttctcgggaatncncccttttggccccccaacctgggtttttttcccccttccttttaatnantttttcnanacaaanctttnngngtttnggaaaangcctttnnctgnnnnttttttcccttccccttttnnangggnttcccccccccccngaatttttttt

SEQ ID NO: 93 - DNA, 400 bp, Artificial Sequence
  Description of Artificial Sequence: Note = Synthetic Construct
ttcctgggtgcggtctcctctgagatagtgtatcccctatagggggggtctcactttagcacagtttatgaatattattacatatttcacaagactttatattgttataatatgcctcatgtgagatatatgtgattctgtggtggtgttctcagagggggtttgggttattggggataatagtttgcccctcgcggggtctatatttatatatgtgacacaatatattagagagatttttggttatatatatttcccttcgcgggggtggagatttatcacagggggagagcttttcccttgttagcaaaagtccctggtctcgtcccccatctcccaaaaaaaaaaaaatgtgaaaaaaaaaaaaaaaagggcccctcttgagtgatgtccccttctt

SEQ ID NO: 94 - DNA, 880 bp, Artificial Sequence
  Description of Artificial Sequence: Note = Synthetic Construct
  misc_feature (11)..(11): n is a, c, g, or t
  misc_feature (13)..(13): n is a, c, g, or t
  misc_feature (24)..(24): n is a, c, g, or t
  misc_feature (27)..(28): n is a, c, g, or t
  misc_feature (45)..(45): n is a, c, g, or t
  misc_feature (56)..(56): n is a, c, g, or t
  misc_feature (58)..(58): n is a, c, g, or t
  misc_feature (67)..(67): n is a, c, g, or t
  misc_feature (84)..(84): n is a, c, g, or t
  misc_feature (91)..(91): n is a, c, g, or t
  misc_feature (105)..(105): n is a, c, g, or t
  misc_feature (177)..(177): n is a, c, g, or t
  misc_feature (190)..(190): n is a, c, g, or t
  misc_feature (252)..(252): n is a, c, g, or t
  misc_feature (265)..(266): n is a, c, g, or t
  misc_feature (272)..(272): n is a, c, g, or t
  misc_feature (284)..(284): n is a, c, g, or t
  misc_feature (344)..(344): n is a, c, g, or t
  misc_feature (389)..(389): n is a, c, g, or t
  misc_feature (427)..(428): n is a, c, g, or t
  misc_feature (443)..(443): n is a, c, g, or t
  misc_feature (449)..(449): n is a, c, g, or t
  misc_feature (611)..(611): n is a, c, g, or t
  misc_feature (840)..(840): n is a, c, g, or t
  misc_feature (848)..(848): n is a, c, g, or t
  misc_feature (859)..(860): n is a, c, g, or t
  misc_feature (878)..(878): n is a, c, g, or t
acccaatcttnanggtggcagtgnggnngatcttaacggtttttnagaaaaaaaantncttcgctcncacccccaagcctcccnttcttancagcttttttatangaaaaaagatgataacgaaattttaaaaaccgtcgttagaggaaatgaaggttcagccgaccattacctganagtaatgaaggtnttccggagggttgccttccaatcccagatggatttgagtttcaggatcaattcagttaccgntgaccatccaccnncctccngtataatcattngatgaggatgaatggtgagtgagtgatgatgatgatgatgatgatgaagggatgagaagnacactatgataacaagtgtctcagtccacattaaggtttgcctgnaaattagtgcataagccatgggagacaaattcttttcnnacacaattaatagtntcttantccttcccatcttctctgccccattctgttttccaccacaggtctgcagcgggctacagcttccagtctccaagcaaataccagaactggaggagaaaattccagtccagtgagtcatgggcagggggaggggtggggtaagggcagtggcgctcattcctnacatggtgtcttctcttgcctagcctgggatctgagggcaagagaacctgtaagcttgatttgatttccactgctgactggagtcactgccaagggatttgggacttctccatctctctctctaacctgaaatccttaggattctattatttcaccggaccagagctgtagcagagatgagctccaagtttgaaatgagaaaggggaaattgagagctatgagctaggngcgaaagnccccacaaagnntttggcaagtagaaaagncg

SEQ ID NO: 95 - DNA, 909 bp, Artificial Sequence
  Description of Artificial Sequence: Note = Synthetic Construct
  misc_feature (3)..(3): n is a, c, g, or t
  misc_feature (7)..(8): n is a, c, g, or t
  misc_feature (17)..(19): n is a, c, g, or t
  misc_feature (23)..(23): n is a, c, g, or t
  misc_feature (30)..(31): n is a, c, g, or t
  misc_feature (50)..(52): n is a, c, g, or t
  misc_feature (55)..(55): n is a, c, g, or t
  misc_feature (59)..(59): n is a, c, g, or t
  misc_feature (61)..(62): n is a, c, g, or t
  misc_feature (64)..(64): n is a, c, g, or t
  misc_feature (68)..(68): n is a, c, g, or t
  misc_feature (80)..(80): n is a, c, g, or t
  misc_feature (82)..(85): n is a, c, g, or t
  misc_feature (96)..(96): n is a, c, g, or t
  misc_feature (100)..(100): n is a, c, g, or t
  misc_feature (107)..(107): n is a, c, g, or t
  misc_feature (113)..(113): n is a, c, g, or t
  misc_feature (118)..(118): n is a, c, g, or t
  misc_feature (121)..(121): n is a, c, g, or t
  misc_feature (131)..(132): n is a, c, g, or t
  misc_feature (151)..(151): n is a, c, g, or t
  misc_feature (154)..(154): n is a, c, g, or t
  misc_feature (164)..(164): n is a, c, g, or t
  misc_feature (168)..(168): n is a, c, g, or t
  misc_feature (173)..(173): n is a, c, g, or t
  misc_feature (184)..(185): n is a, c, g, or t
  misc_feature (189)..(189): n is a, c, g, or t
  misc_feature (198)..(198): n is a, c, g, or t
  misc_feature (200)..(200): n is a, c, g, or t
  misc_feature (203)..(203): n is a, c, g, or t
  misc_feature (205)..(205): n is a, c, g, or t
  misc_feature (208)..(208): n is a, c, g, or t
  misc_feature (211)..(212): n is a, c, g, or t
  misc_feature (215)..(215): n is a, c, g, or t
  misc_feature (217)..(217): n is a, c, g, or t
  misc_feature (219)..(219): n is a, c, g, or t
  misc_feature (229)..(230): n is a, c, g, or t
  misc_feature (234)..(235): n is a, c, g, or t
  misc_feature (242)..(242): n is a, c, g, or t
  misc_feature (249)..(249): n is a, c, g, or t
  misc_feature (252)..(252): n is a, c, g, or t
  misc_feature (255)..(256): n is a, c, g, or t
  misc_feature (284)..(285): n is a, c, g, or t
  misc_feature (289)..(289): n is a, c, g, or t
  misc_feature (294)..(294): n is a, c, g, or t
  misc_feature (296)..(296): n is a, c, g, or t
  misc_feature (304)..(306): n is a, c, g, or t
  misc_feature (313)..(313): n is a, c, g, or t
  misc_feature (319)..(319): n is a, c, g, or t
  misc_feature (322)..(322): n is a, c, g, or t
  misc_feature (326)..(326): n is a, c, g, or t
  misc_feature (328)..(328): n is a, c, g, or t
  misc_feature (333)..(333): n is a, c, g, or t
  misc_feature (336)..(336): n is a, c, g, or t
  misc_feature (350)..(351): n is a, c, g, or t
  misc_feature (355)..(355): n is a, c, g, or t
  misc_feature (366)..(366): n is a, c, g, or t
  misc_feature (370)..(370): n is a, c, g, or t
  misc_feature (376)..(378): n is a, c, g, or t
  misc_feature (380)..(380): n is a, c, g, or t
  misc_feature (382)..(383): n is a, c, g, or t
  misc_feature (386)..(387): n is a, c, g, or t
  misc_feature (395)..(399): n is a, c, g, or t
  misc_feature (404)..(404): n is a, c, g, or t
  misc_feature (406)..(406): n is a, c, g, or t
  misc_feature (409)..(409): n is a, c, g, or t
  misc_feature (411)..(411): n is a, c, g, or t
  misc_feature (416)..(416): n is a, c, g, or t
  misc_feature (423)..(423): n is a, c, g, or t
  misc_feature (429)..(429): n is a, c, g, or t
  misc_feature (433)..(434): n is a, c, g, or t
  misc_feature (438)..(438): n is a, c, g, or t
  misc_feature (453)..(453): n is a, c, g, or t
  misc_feature (466)..(468): n is a, c, g, or t
  misc_feature (471)..(471): n is a, c, g, or t
  misc_feature (488)..(488): n is a, c, g, or t
  misc_feature (494)..(494): n is a, c, g, or t
  misc_feature (501)..(501): n is a, c, g, or t
  misc_feature (513)..(515): n is a, c, g, or t
  misc_feature (524)..(524): n is a, c, g, or t
  misc_feature (528)..(529): n is a, c, g, or t
  misc_feature (534)..(535): n is a, c, g, or t
  misc_feature (545)..(545): n is a, c, g, or t
  misc_feature (549)..(549): n is a, c, g, or t
  misc_feature (557)..(558): n is a, c, g, or t
  misc_feature (570)..(570): n is a, c, g, or t
  misc_feature (580)..(580): n is a, c, g, or t
  misc_feature (583)..(583): n is a, c, g, or t
  misc_feature (588)..(588): n is a, c, g, or t
  misc_feature (601)..(601): n is a, c, g, or t
  misc_feature (603)..(604): n is a, c, g, or t
  misc_feature (609)..(609): n is a, c, g, or t
  misc_feature (612)..(612): n is a, c, g, or t
  misc_feature (615)..(615): n is a, c, g, or t
  misc_feature (627)..(627): n is a, c, g, or t
  misc_feature (629)..(629): n is a, c, g, or t
  misc_feature (633)..(633): n is a, c, g, or t
  misc_feature (640)..(640): n is a, c, g, or t
  misc_feature (645)..(646): n is a, c, g, or t
  misc_feature (648)..(648): n is a, c, g, or t
  misc_feature (655)..(655): n is a, c, g, or t
  misc_feature (667)..(667): n is a, c, g, or t
  misc_feature (672)..(672): n is a, c, g, or t
  misc_feature (676)..(676): n is a, c, g, or t
  misc_feature (678)..(678): n is a, c, g, or t
  misc_feature (682)..(682): n is a, c, g, or t
  misc_feature (684)..(684): n is a, c, g, or t
  misc_feature (688)..(688): n is a, c, g, or t
  misc_feature (691)..(691): n is a, c, g, or t
  misc_feature (693)..(694): n is a, c, g, or t
  misc_feature (698)..(698): n is a, c, g, or t
  misc_feature (704)..(704): n is a, c, g, or t
  misc_feature (707)..(707): n is a, c, g, or t
  misc_feature (710)..(710): n is a, c, g, or t
  misc_feature (713)..(714): n is a, c, g, or t
  misc_feature (717)..(718): n is a, c, g, or t
  misc_feature (721)..(721): n is a, c, g, or t
  misc_feature (728)..(728): n is a, c, g, or t
  misc_feature (730)..(730): n is a, c, g, or t
  misc_feature (736)..(736): n is a, c, g, or t
  misc_feature (740)..(740): n is a, c, g, or t
  misc_feature (747)..(747): n is a, c, g, or t
  misc_feature (751)..(751): n is a, c, g, or t
  misc_feature (760)..(762): n is a, c, g, or t
  misc_feature (767)..(767): n is a, c, g, or t
  misc_feature (776)..(776): n is a, c, g, or t
  misc_feature (781)..(782): n is a, c, g, or t
  misc_feature (786)..(786): n is a, c, g, or t
  misc_feature (790)..(790): n is a, c, g, or t
  misc_feature (792)..(792): n is a, c, g, or t
  misc_feature (796)..(796): n is a, c, g, or t
  misc_feature (799)..(799): n is a, c, g, or t
  misc_feature (807)..(807): n is a, c, g, or t
  misc_feature (814)..(814): n is a, c, g, or t
  misc_feature (816)..(816): n is a, c, g, or t
  misc_feature (823)..(823): n is a, c, g, or t
  misc_feature (829)..(829): n is a, c, g, or t
  misc_feature (833)..(835): n is a, c, g, or t
  misc_feature (842)..(843): n is a, c, g, or t
  misc_feature (848)..(849): n is a, c, g, or t
  misc_feature (851)..(851): n is a, c, g, or t
  misc_feature (855)..(855): n is a, c, g, or t
  misc_feature (860)..(860): n is a, c, g, or t
  misc_feature (863)..(863): n is a, c, g, or t
  misc_feature (868)..(868): n is a, c, g, or t
  misc_feature (871)..(872): n is a, c, g, or t
  misc_feature (874)..(874): n is a, c, g, or t
  misc_feature (893)..(893): n is a, c, g, or t
  misc_feature (899)..(899): n is a, c, g, or t
  misc_feature (908)..(908): n is a, c, g, or t
cgngagnnggcagggannnaggngggagcnngagaggagaaggagaaggnnnggnaggngnngngagnaacgggcgggancnnnngacgagagaangggnaggggancgaagngcggnggnagacggtgcnngggggggaggggcaggagnggnagagaggcangagnggagnggggacaagcnnaaancgaggaggnangangnganggnnggngngncgaaggcgcnnaagnnggtcggngagcggnagnggnnaaactggggaacgagacagacggccccnncggnggcangngggagagnnncgccagngagagnagncagnancagancangggagggggggganncacnggcgggagggncgangacggnnngnannggnnagaggcannnnncgccnanagngngaagngaggcangagtgncgcnngagnagacaggcccgcgcnccgggggcagacnnnggncaccaccgagggtgggnggggcncggaganaagaccagaggnnngagggcganggcnngggtnngcccgggccncccnaaaaaaannccgaaaaaaaanaaggggcgcngcngggcnggggaggagcgcntnncgtangtngantgacggaggccngnaatngggccgngccanncnagggcgnagaggcccaagngcggnaggngnaagnanaganccngnnggtngggagnganagngcnnggnnccnacccccngngttganggcncccacgncggngcaggccgnnnaaagngagtccccnaaaanntcgnggtntnacancgncccggggncgccgcngngtcccgncacacnggannncggaganngcctnntntctncacanggngccanacnngntgctatgcaaaaggggcgnacttcnagaaaaagnc

SEQ ID NO: 96 - DNA, 927 bp, Artificial Sequence
  Description of Artificial Sequence: Note = Synthetic Construct
  misc_feature (21)..(23): n is a, c, g, or t
  misc_feature (36)..(36): n is a, c, g, or t
  misc_feature (60)..(61): n is a, c, g, or t
  misc_feature (65)..(65): n is a, c, g, or t
  misc_feature (76)..(76): n is a, c, g, or t
  misc_feature (79)..(79): n is a, c, g, or t
  misc_feature (89)..(89): n is a, c, g, or t
  misc_feature (95)..(95): n is a, c, g, or t
  misc_feature (100)..(100): n is a, c, g, or t
  misc_feature (110)..(110): n is a, c, g, or t
  misc_feature (124)..(124): n is a, c, g, or t
  misc_feature (135)..(135): n is a, c, g, or t
  misc_feature (138)..(138): n is a, c, g, or t
  misc_feature (146)..(146): n is a, c, g, or t
  misc_feature (150)..(150): n is a, c, g, or t
  misc_feature (167)..(167): n is a, c, g, or t
  misc_feature (178)..(178): n is a, c, g, or t
  misc_feature (180)..(180): n is a, c, g, or t
  misc_feature (197)..(197): n is a, c, g, or t
  misc_feature (203)..(203): n is a, c, g, or t
  misc_feature (209)..(209): n is a, c, g, or t
  misc_feature (215)..(215): n is a, c, g, or t
  misc_feature (232)..(232): n is a, c, g, or t
  misc_feature (242)..(242): n is a, c, g, or t
  misc_feature (252)..(252): n is a, c, g, or t
  misc_feature (259)..(259): n is a, c, g, or t
  misc_feature (274)..(274): n is a, c, g, or t
  misc_feature (290)..(290): n is a, c, g, or t
  misc_feature (302)..(302): n is a, c, g, or t
  misc_feature (314)..(314): n is a, c, g, or t
  misc_feature (330)..(330): n is a, c, g, or t
  misc_feature (341)..(341): n is a, c, g, or t
  misc_feature (348)..(348): n is a, c, g, or t
  misc_feature (354)..(354): n is a, c, g, or t
  misc_feature (361)..(361): n is a, c, g, or t
  misc_feature (364)..(364): n is a, c, g, or t
  misc_feature (399)..(399): n is a, c, g, or t
  misc_feature (442)..(442): n is a, c, g, or t
  misc_feature (448)..(448): n is a, c, g, or t
  misc_feature (538)..(538): n is a, c, g, or t
  misc_feature (543)..(543): n is a, c, g, or t
  misc_feature (549)..(549): n is a, c, g, or t
  misc_feature (552)..(552): n is a, c, g, or t
  misc_feature (589)..(589): n is a, c, g, or t
  misc_feature (621)..(621): n is a, c, g, or t
  misc_feature (627)..(627): n is a, c, g, or t
  misc_feature (651)..(651): n is a, c, g, or t
  misc_feature (670)..(670): n is a, c, g, or t
  misc_feature (791)..(791): n is a, c, g, or t
  misc_feature (828)..(828): n is a, c, g, or t
  misc_feature (857)..(857): n is a, c, g, or t
  misc_feature (871)..(871): n is a, c, g, or t
  misc_feature (876)..(876): n is a, c, g, or t
  misc_feature (893)..(893): n is a, c, g, or t
  misc_feature (916)..(916): n is a, c, g, or t
  misc_feature (925)..(925): n is a, c, g, or t
cctttattcggaggcagggannncttgtccgggaangttaaacgttttttaaaagggggnncccnggggggggggnttntccagggaantaaaanggtgngttggggggnaaaaatttattttnaaaaagggcgnccnatataaangacnttcgggggggtttgaanagggccggaancntcgacgggtttccgggngggganaagganaagggnacgcacgggatttcttncccttttttngcaaattgcngcagganaccaccgggtggggnggttttgttttccgtnaagaaagcgggngtggaaaaacanggataaacgggaaganggggttatttnggttagnaattgnttccagnggngccaggaaattggcctgtccaaaattcttttcccngcttttaagacaggcaggtattatttggcagcaggttattacnataggnaagtaaataacaatgggtaagtgcctggcacaggccagggtaagtagggcatgtatggaatgttaaacattacccttcatcctgagaaanaaaanacaagnaanaaaggctggtctcacatatcccaaagctttatcttcntaggtgccccatggtgaacgttaagccaagcntatgantcacaagggacgacatgggcaggntagggtacagaatcagtgntcagagactccaggggcacccctgattccctttgctgtcacacagacactgctccagggacaaccctccggatgtgagtatatgacttcctgatggtgacgctgccgtgatgggacactcntcgtggtagcacacattcctcagtcagcttctgagcntcagggtcccagcagagcacagtggcaangactttcattcttnttggnctttcccagggggcgtncccaaatggaagatttggcaagntaaggaagntc

SEQ ID NO: 97 - DNA, 848 bp, Artificial Sequence
  Description of Artificial Sequence: Note = Synthetic Construct
  misc_feature (14)..(14): n is a, c, g, or t
  misc_feature (17)..(17): n is a, c, g, or t
  misc_feature (22)..(22): n is a, c, g, or t
  misc_feature (30)..(30): n is a, c, g, or t
  misc_feature (36)..(36): n is a, c, g, or t
  misc_feature (44)..(44): n is a, c, g, or t
  misc_feature (48)..(48): n is a, c, g, or t
  misc_feature (58)..(58): n is a, c, g, or t
  misc_feature (60)..(60): n is a, c, g, or t
  misc_feature (71)..(71): n is a, c, g, or t
  misc_feature (74)..(74): n is a, c, g, or t
  misc_feature (87)..(87): n is a, c, g, or t
  misc_feature (109)..(109): n is a, c, g, or t
  misc_feature (122)..(122): n is a, c, g, or t
  misc_feature (127)..(127): n is a, c, g, or t
  misc_feature (130)..(130): n is a, c, g, or t
  misc_feature (134)..(134): n is a, c, g, or t
  misc_feature (147)..(147): n is a, c, g, or t
  misc_feature (160)..(160): n is a, c, g, or t
  misc_feature (187)..(187): n is a, c, g, or t
  misc_feature (207)..(207): n is a, c, g, or t
  misc_feature (212)..(212): n is a, c, g, or t
  misc_feature (226)..(226): n is a, c, g, or t
  misc_feature (228)..(228): n is a, c, g, or t
  misc_feature (259)..(259): n is a, c, g, or t
  misc_feature (270)..(270): n is a, c, g, or t
  misc_feature (291)..(291): n is a, c, g, or t
  misc_feature (293)..(293): n is a, c, g, or t
  misc_feature (332)..(332): n is a, c, g, or t
  misc_feature (354)..(354): n is a, c, g, or t
  misc_feature (362)..(362): n is a, c, g, or t
  misc_feature (459)..(459): n is a, c, g, or t
  misc_feature (496)..(497): n is a, c, g, or t
  misc_feature (499)..(500): n is a, c, g, or t
  misc_feature (505)..(505): n is a, c, g, or t
  misc_feature (507)..(507): n is a, c, g, or t
  misc_feature (627)..(627): n is a, c, g, or t
  misc_feature (642)..(642): n is a, c, g, or t
  misc_feature (694)..(694): n is a, c, g, or t
  misc_feature (718)..(718): n is a, c, g, or t
  misc_feature (771)..(771): n is a, c, g, or t
  misc_feature (794)..(794): n is a, c, g, or t
  misc_feature (830)..(830): n is a, c, g, or t
  misc_feature (833)..(833): n is a, c, g, or t
  misc_feature (839)..(839): n is a, c, g, or t
ttttccaagtaaancanggganttcggtanaagaangtttaaanaagngtccaggcancngaaattttcgnggntttggttaacgangcaaccaggggggggtttcaangggtcttctaatnatttnaangggngtagtttctggtnggttcattccttnaaaaaaaaacaaaacaaaacaaaccgnagcttctgcattggccaccngttgnggcaccaacccttnangcattgccctttccttcctgccgtgtcgggnggcgctaagcngcccttgtcaccttccatttntngatcattttccatgtccttgcacttctgcttccacttcntgttggtagacgagctgtatgntcagaaantgaagtacaaggccatcagcgaggagctggaccacgctctcaacgatatgacttccatgtaaatgttcatgcaccctgcctgcttgcaccctcaccntcatgcttgtgtgatgacctcaccgtggctcccccannannaaaananatccatgtctgcaccttttgttggctttcttgcataacctaggataggttatcttttccacgttgcactaacaaggccacgcgcattcggtccgtgaaaccacctcggcatccttttatntcatagaggcaaatntagcttgtttctgccgagagatgacctggactccgaatgggctctgagtatntccttttaaaaccttaaaccagantcaagtaaagttaggaagccatgaggcagtggtgcaggaagttaggaagaaanaccgggttgttggtttcctgggnctggggtgagggaccattgatagacctttacgaaanganccgcangatagaaaa

SEQ ID NO: 98 - DNA, 896 bp, Artificial Sequence
  Description of Artificial Sequence: Note = Synthetic Construct
  misc_feature (15)..(15): n is a, c, g, or t
  misc_feature (17)..(18): n is a, c, g, or t
  misc_feature (33)..(33): n is a, c, g, or t
  misc_feature (39)..(39): n is a, c, g, or t
  misc_feature (47)..(47): n is a, c, g, or t
  misc_feature (50)..(50): n is a, c, g, or t
  misc_feature (53)..(53): n is a, c, g, or t
  misc_feature (60)..(60): n is a, c, g, or t
  misc_feature (64)..(64): n is a, c, g, or t
  misc_feature (66)..(66): n is a, c, g, or t
  misc_feature (68)..(68): n is a, c, g, or t
  misc_feature (75)..(75): n is a, c, g, or t
  misc_feature (77)..(77): n is a, c, g, or t
  misc_feature (79)..(79): n is a, c, g, or t
  misc_feature (81)..(82): n is a, c, g, or t
  misc_feature (94)..(94): n is a, c, g, or t
  misc_feature (105)..(105): n is a, c, g, or t
  misc_feature (120)..(121): n is a, c, g, or t
  misc_feature (124)..(124): n is a, c, g, or t
  misc_feature (127)..(127): n is a, c, g, or t
  misc_feature (134)..(135): n is a, c, g, or t
  misc_feature (137)..(137): n is a, c, g, or t
  misc_feature (140)..(140): n is a, c, g, or t
  misc_feature (154)..(154): n is a, c, g, or t
  misc_feature (169)..(169): n is a, c, g, or t
  misc_feature (172)..(172): n is a, c, g, or t
  misc_feature (179)..(179): n is a, c, g, or t
  misc_feature (188)..(188): n is a, c, g, or t
  misc_feature (190)..(191): n is a, c, g, or t
  misc_feature (200)..(200): n is a, c, g, or t
  misc_feature (204)..(204): n is a, c, g, or t
  misc_feature (213)..(213): n is a, c, g, or t
  misc_feature (221)..(221): n is a, c, g, or t
  misc_feature (228)..(228): n is a, c, g, or t
  misc_feature (234)..(234): n is a, c, g, or t
  misc_feature (279)..(279): n is a, c, g, or t
  misc_feature (289)..(290): n is a, c, g, or t
  misc_feature (294)..(294): n is a, c, g, or t
  misc_feature (297)..(297): n is a, c, g, or t
  misc_feature (321)..(321): n is a, c, g, or t
  misc_feature (328)..(328): n is a, c, g, or t
  misc_feature (367)..(368): n is a, c, g, or t
  misc_feature (394)..(394): n is a, c, g, or t
  misc_feature (398)..(398): n is a, c, g, or t
  misc_feature (443)..(444): n is a, c, g, or t
  misc_feature (452)..(452): n is a, c, g, or t
  misc_feature (463)..(463): n is a, c, g, or t
  misc_feature (467)..(467): n is a, c, g, or t
  misc_feature (518)..(518): n is a, c, g, or t
  misc_feature (541)..(541): n is a, c, g, or t
  misc_feature (544)..(544): n is a, c, g, or t
  misc_feature (552)..(552): n is a, c, g, or t
  misc_feature (587)..(587): n is a, c, g, or t
  misc_feature (623)..(623): n is a, c, g, or t
  misc_feature (635)..(635): n is a, c, g, or t
  misc_feature (703)..(703): n is a, c, g, or t
  misc_feature (712)..(712): n is a, c, g, or t
  misc_feature (728)..(728): n is a, c, g, or t
  misc_feature (733)..(734): n is a, c, g, or t
  misc_feature (745)..(745): n is a, c, g, or t
  misc_feature (823)..(823): n is a, c, g, or t
  misc_feature (846)..(846): n is a, c, g, or t
agagaaaaaggaaananngaaagaaagaggagnaaaaanaaagaggnggnaanaaagaanagangnanaaagaananantnngagattacgaantcggggagagngaaaggaaacaaagnnggnggnaaagagnnanttntttcaagggtccgnaacaaaaagttgagngangattccnaacaagggntnnccacccaanctgntaaagggangatttggncaaacanaaaccngtattggggagttaaaaagagtcaccaaatagggaaaaaaagttngggggagggnnaacnacngggtaaaggttccaggaccagagngttcagnaccaagtttcagtattcaggaggacagagttcaggatcnntttggaacattggggtttgggtagcntggnaacacgaacccttttgttcataaaaaggaagggaaaagaaagggnngaagagtnttcccagatgnattntgagcagagaatgcccgaccccccgaatacgtagttccaaaatgggattgnacctgtttcacctcaaatttcantcntccttctngtggacagacgcagggatggggtcggggaaggggngaagctggtgcgtgttctgtggttgccggtggatgntctgcagctgtntaccccaccgaaaacgaatggatgggatgtcactcccaggcagtagggggcgcacgcgcattgtgttntagagaganttccccagcctccccnggaannacaacacgttntcttcttcttaaggtggtggtgggggggggggggaagacctattgctttccgagaggatcggaccaaacagcagattntgctcaaggcccttgaaccctgntatctcactaaacatctgagatactgacattacagatacggatatcgtgg

SEQ ID NO: 99 - DNA, 858 bp, Artificial Sequence
  Description of Artificial Sequence: Note = Synthetic Construct
  misc_feature (13)..(13): n is a, c, g, or t
  misc_feature (31)..(31): n is a, c, g, or t
  misc_feature (33)..(33): n is a, c, g, or t
  misc_feature (43)..(44): n is a, c, g, or t
  misc_feature (52)..(52): n is a, c, g, or t
  misc_feature (66)..(66): n is a, c, g, or t
  misc_feature (71)..(71): n is a, c, g, or t
  misc_feature (74)..(74): n is a, c, g, or t
  misc_feature (78)..(78): n is a, c, g, or t
  misc_feature (108)..(108): n is a, c, g, or t
  misc_feature (126)..(126): n is a, c, g, or t
  misc_feature (152)..(152): n is a, c, g, or t
  misc_feature (162)..(162): n is a, c, g, or t
  misc_feature (177)..(177): n is a, c, g, or t
  misc_feature (181)..(181): n is a, c, g, or t
  misc_feature (185)..(185): n is a, c, g, or t
  misc_feature (188)..(188): n is a, c, g, or t
  misc_feature (194)..(194): n is a, c, g, or t
  misc_feature (197)..(197): n is a, c, g, or t
  misc_feature (204)..(204): n is a, c, g, or t
  misc_feature (209)..(209): n is a, c, g, or t
  misc_feature (211)..(211): n is a, c, g, or t
  misc_feature (214)..(214): n is a, c, g, or t
  misc_feature (216)..(216): n is a, c, g, or t
  misc_feature (231)..(231): n is a, c, g, or t
  misc_feature (247)..(247): n is a, c, g, or t
  misc_feature (253)..(253): n is a, c, g, or t
  misc_feature (331)..(331): n is a, c, g, or t
  misc_feature (360)..(360): n is a, c, g, or t
  misc_feature (381)..(381): n is a, c, g, or t
  misc_feature (390)..(390): n is a, c, g, or t
  misc_feature (495)..(495): n is a, c, g, or t
  misc_feature (520)..(520): n is a, c, g, or t
  misc_feature (532)..(532): n is a, c, g, or t
gccaatcaagttncggttaaattttggaaangnggcgaatgcnntgtcttgnggattttggagggnggaangtnggtnaaagagttttaatgttcttgggatcgcaantattttcctggttcgcgncttgtacattatgagggttgataacngctgtttttngattttggttaacangggngggngcntttttnggntgacctntagtncntcngngccgggcattttggntacctttttatttttngaagtncagggatgttgtgtactgggaatattccttagaagtgaccatgattttatattttattaaatatatacttagattcantctttgcctaagcctggatgttgttggtntttgtttttgttttgttgttnggagagttntcattttcccaagctggctttgaacattcacttccacacaaacatgtccacacacgggcaaaggtgtatgcacagatatggacataacacacacagagaagaatnacaaacaaacaaacaaaatatttcngacagaaacaantaaatacatccagaaggtagaatattctacaaggcatcaaatctgttctaaagaaaaagttataataaagaaaaacattgaaaggcaggtgaaggagattgaaggccataggggccacaaaaaggtttaaacagcaaagcaccaacgtagatatccggaacgtgctaaatatggcacacacaggatatccgggaacgatgagtcagccagcggcacatataaccaacgatgtaatctgttatgtaactatgaatcatccctggcagagtgccacctttgtgtgatttttgtataaatatgcccctgagaccagaagccattgcctt

SEQ ID NO: 100 - DNA, 551 bp, Artificial Sequence
  Description of Artificial Sequence: Note = Synthetic Construct
  misc_feature (3)..(3): n is a, c, g, or t
  misc_feature (37)..(37): n is a, c, g, or t
  misc_feature (46)..(46): n is a, c, g, or t
  misc_feature (63)..(63): n is a, c, g, or t
  misc_feature (66)..(66): n is a, c, g, or t
  misc_feature (69)..(69): n is a, c, g, or t
  misc_feature (72)..(72): n is a, c, g, or t
  misc_feature (98)..(98): n is a, c, g, or t
  misc_feature (104)..(104): n is a, c, g, or t
  misc_feature (108)..(109): n is a, c, g, or t
  misc_feature (117)..(117): n is a, c, g, or t
  misc_feature (122)..(122): n is a, c, g, or t
  misc_feature (128)..(128): n is a, c, g, or t
  misc_feature (146)..(146): n is a, c, g, or t
  misc_feature (175)..(175): n is a, c, g, or t
  misc_feature (179)..(179): n is a, c, g, or t
  misc_feature (186)..(186): n is a, c, g, or t
  misc_feature (207)..(207): n is a, c, g, or t
  misc_feature (211)..(211): n is a, c, g, or t
  misc_feature (225)..(225): n is a, c, g, or t
  misc_feature (233)..(233): n is a, c, g, or t
  misc_feature (239)..(240): n is a, c, g, or t
  misc_feature (244)..(244): n is a, c, g, or t
  misc_feature (248)..(248): n is a, c, g, or t
  misc_feature (258)..(258): n is a, c, g, or t
  misc_feature (264)..(264): n is a, c, g, or t
  misc_feature (277)..(277): n is a, c, g, or t
  misc_feature (279)..(279): n is a, c, g, or t
  misc_feature (283)..(283): n is a, c, g, or t
  misc_feature (289)..(289): n is a, c, g, or t
  misc_feature (303)..(303): n is a, c, g, or t
  misc_feature (305)..(305): n is a, c, g, or t
  misc_feature (310)..(310): n is a, c, g, or t
  misc_feature (313)..(313): n is a, c, g, or t
  misc_feature (333)..(333): n is a, c, g, or t
  misc_feature (339)..(339): n is a, c, g, or t
  misc_feature (344)..(344): n is a, c, g, or t
  misc_feature (348)..(348): n is a, c, g, or t
  misc_feature (351)..(351): n is a, c, g, or t
  misc_feature (355)..(355): n is a, c, g, or t
  misc_feature (359)..(359): n is a, c, g, or t
  misc_feature (361)..(361): n is a, c, g, or t
  misc_feature (363)..(363): n is a, c, g, or t
  misc_feature (370)..(372): n is a, c, g, or t
  misc_feature (377)..(377): n is a, c, g, or t
  misc_feature (384)..(384): n is a, c, g, or t
  misc_feature (389)..(389): n is a, c, g, or t
  misc_feature (393)..(393): n is a, c, g, or t
  misc_feature (398)..(398): n is a, c, g, or t
  misc_feature (405)..(405): n is a, c, g, or t
  misc_feature (408)..(408): n is a, c, g, or t
  misc_feature (414)..(414): n is a, c, g, or t
  misc_feature (420)..(421): n is a, c, g, or t
  misc_feature (430)..(430): n is a, c, g, or t
  misc_feature (474)..(474): n is a, c, g, or t
  misc_feature (478)..(478): n is a, c, g, or t
  misc_feature (489)..(490): n is a, c, g, or t
  misc_feature (492)..(492): n is a, c, g, or t
  misc_feature (504)..(504): n is a, c, g, or t
  misc_feature (507)..(507): n is a, c, g, or t
  misc_feature (516)..(516): n is a, c, g, or t
  misc_feature (532)..(532): n is a, c, g, or t
  misc_feature (540)..(540): n is a, c, g, or t
ttntctgtacccccttctcaaaaaaagtggctggtgncttttctcngaagagaatcctcaccnccncanaanaaatatctctctcccccccttgttgnttgtcncccnncccaaaantgtgngatctntctctctgtgcacgaganattttagagggggatatccccggggtgtngccngtgtctntcctctcgcgaatatctttangagnctctctctctcgancccccagngtaggnngagngganaacatttttntgtggnggccccccacaanancacnaacaanatattttcgagaancncatgnganaatcgggggggggggggccngtgttnacacnatanccngggngatnananagacacnnnatatntctgggntgtgnaaanataanacaagancanacatgnggagannatgtgagantgtgcacaccctgttgtgacatgtgaggtggggggctgatgatncctnccttctacgtnntntcttctcctccncantgatagacnccacctgctggagtgnctagctanctggggtcggt

SEQ ID NO: 101 - DNA, 888 bp, Artificial Sequence
  Description of Artificial Sequence: Note = Synthetic Construct
gttaaatatgaaaaagtgggggtgacagggggtgataccctttgcgccgggctatggatttttggcaccgataagattttcaggtgacatggaaggtggttggggatgggggaaagttttgaggggccaaaaggataaggaggatgattgattggtttgggagcagtacttggaaagagtgtgtttgatcggtaaacaaccacgtgtagtgtgtttttgttgcagcagagataagtgagaaaaagatttcaggagatcttgatttttttcgggtcgagctatgttgggggatgtgagggtacaattcacaagatttgttcacagggagttctaggaggtggtcccattagccggtaggggggttttctcaataaatgggttcagtcaggtgtttgcctagatctttcattagttcctcccttcaaagggattttgaaggagtgctttgtcctgtggagcaattgactcaatcaataaacttaagtaatctcccggattactgttgatgcgttcccagagaggtcccccgtagttaccagtgaatcacaatttcctaaccatatgatttttgttaatctcaccacataaacccacaattctcgcgtcctttgtgatggtttcaaagtctggaatattttttcctccatccctcctttccttcctccttttatccctcccttccttttttcctttcacaggatctcattatgcagcccagtcaggccttaaacttgtgatcctcctgtctcagcctcctaggtgttaagatgacccaaatgtaaaccatgtccagttacttcctcctaatcccatcttcagatatcctttaagaccaaattaaatattaactgaaagaccccaccagtaggtttggcaagctagcaaaga

SEQ ID NO: 102 - DNA, 867 bp, Artificial Sequence
  Description of Artificial Sequence: Note = Synthetic Construct
ctttttctaaattttttaacgggggaaatcaaacggcaaaaaagaggggggaccacctcaatcacccacagtggaaaattggtgggtatcaatcaggtgttattagggggggaggaatgttggggaacaaaaaaaaaattttaaaaatttccaggggggttttgaaggcaggtgatttaaaaaccgcccgtcagttaagggggttttatttttttttaataaaaaataaaattaggattctggaatagaatttttaattcagggatccttatttttaatgtttccagggtaaaagggagatattcttatcaggtttctggaaaaagtttgcttggtttcctttggcaggagagaggtttaaaaaagacttcatttgaactttttgatcattgtgtaaaacttttttttttgaacaaaacaataaaatgtaaaaagatatagatcttaggttttttaaaagacaaacatataaaatattaaaacagattgtctgtcccatgcaaatgactgactgaccttgtaacagctccacagagtgtgtaaaaacaaaaaaaagccccctgagagccttgagccatcaggttaagtctcatttattaatattttcaaggccacaggagacactctgttcccttcatttagggaggtgctgaggcagccatgttttcccagcagtgggggttgggcagagccactccagattggcttggaggggtgtgtagctctcagtctgcccggacttggatggtttattttcttaaacgaaaacacctgcctgagaaagagcccttttcacggggtggccaagtcccagcccgccctgggagccaaggtcaagtcttagcttagcgttctaaggacacagat

SEQ ID NO: 103 - DNA, 897 bp, Artificial Sequence
  Description of Artificial Sequence: Note = Synthetic Construct
  misc_feature (7)..(7): n is a, c, g, or t
  misc_feature (9)..(9): n is a, c, g, or t
  misc_feature (17)..(17): n is a, c, g, or t
  misc_feature (21)..(21): n is a, c, g, or t
  misc_feature (31)..(31): n is a, c, g, or t
  misc_feature (48)..(48): n is a, c, g, or t
  misc_feature (72)..(72): n is a, c, g, or t
  misc_feature (84)..(84): n is a, c, g, or t
  misc_feature (103)..(103): n is a, c, g, or t
  misc_feature (119)..(119): n is a, c, g, or t
  misc_feature (135)..(135): n is a, c, g, or t
  misc_feature (164)..(164): n is a, c, g, or t
  misc_feature (172)..(172): n is a, c, g, or t
  misc_feature (187)..(187): n is a, c, g, or t
  misc_feature (197)..(197): n is a, c, g, or t
  misc_feature (214)..(214): n is a, c, g, or t
  misc_feature (218)..(218): n is a, c, g, or t
  misc_feature (254)..(254): n is a, c, g, or t
  misc_feature (326)..(326): n is a, c, g, or t
  misc_feature (351)..(351): n is a, c, g, or t
  misc_feature (366)..(366): n is a, c, g, or t
  misc_feature (414)..(414): n is a, c, g, or t
  misc_feature (446)..(446): n is a, c, g, or t
  misc_feature (457)..(457): n is a, c, g, or t
  misc_feature (555)..(555): n is a, c, g, or t
  misc_feature (557)..(557): n is a, c, g, or t
  misc_feature (568)..(568): n is a, c, g, or t
  misc_feature (626)..(626): n is a, c, g, or t
  misc_feature (646)..(646): n is a, c, g, or t
  misc_feature (841)..(841): n is a, c, g, or t
  misc_feature (855)..(855): n is a, c, g, or t
  misc_feature (860)..(860): n is a, c, g, or t
  misc_feature (862)..(862): n is a, c, g, or t
  misc_feature (875)..(875): n is a, c, g, or t
  misc_feature (880)..(880): n is a, c, g, or t
aaagggnancaaaaccntaanggggaggggnggggaaatggccaaaanttggggttaaaaaaagttaggatntggttggatccnacccacaaggaatttgttnttaattttttaaaggnaaatttgggcacttcnattgggaaggttaaaacccaggcaagtgntaccgggntatgcaagtgaaacntgattctggnggtggagggaaggatantganatgtgagtgagtgcagttgagtgaggacttgtgagnacaggtcatgcccaccaaagggaggagcaagggtgggcagtggtaggtggtgtgtggttcctttctgggggntgggcggggagacagatgagaacgntattggaggacaggnacaagtgtactgaaatgcaaatccctgtagatctggaaaaggtctggnttcaggcttgatgcttgggccggcaactgtgnaccttccctgnacgttcagcccccccacccttacggaagttttcgtcactgaagactagtggctaatcagagtcttcaatggacctgccaatcagaaaggaaggcgggntnttccgggtgcntaggtgtaggattcgctcagtagttaagcagtcttaactggttctggctgctgtgctntctgtcctgccgttggattntctgaggcatgttcaggcaagctccaaagttgcgacatggtgagcacaggggcagggggggcgggcggacgggcaggggactgagcagtgggagctggtgtggtgggtctttcccggggctgagttggaatccgcggctacccgtgaggtcttagccactcactagacccagcggcagtttctgaataactttcnttgtaggggttggnactcngnaaagacttccacnaaggncttggcaagtagaaagg

SEQ ID NO: 104 - DNA, 435 bp, Artificial Sequence; identical to SEQ ID NO: 44
  Description of Artificial Sequence: Note = Synthetic Construct
  misc_feature (237)..(237): n is a, c, g, or t
  misc_feature (318)..(318): n is a, c, g, or t
  misc_feature (330)..(330): n is a, c, g, or t
  misc_feature (367)..(367): n is a, c, g, or t
  misc_feature (375)..(375): n is a, c, g, or t
  misc_feature (378)..(378): n is a, c, g, or t
  misc_feature (390)..(390): n is a, c, g, or t
  misc_feature (395)..(395): n is a, c, g, or t
  misc_feature (404)..(404): n is a, c, g, or t
  misc_feature (406)..(406): n is a, c, g, or t
  misc_feature (421)..(421): n is a, c, g, or t

SEQ ID NO: 105 - DNA, 894 bp, Artificial Sequence
  Description of Artificial Sequence: Note = Synthetic Construct
  misc_feature (14)..(15): n is a, c, g, or t
  misc_feature (40)..(40): n is a, c, g, or t
  misc_feature (50)..(50): n is a, c, g, or t
  misc_feature (61)..(61): n is a, c, g, or t
  misc_feature (64)..(64): n is a, c, g, or t
  misc_feature (71)..(71): n is a, c, g, or t
  misc_feature (129)..(129): n is a, c, g, or t
  misc_feature (138)..(138): n is a, c, g, or t
  misc_feature (144)..(144): n is a, c, g, or t
  misc_feature (150)..(150): n is a, c, g, or t
  misc_feature (153)..(153): n is a, c, g, or t
  misc_feature (187)..(187): n is a, c, g, or t
  misc_feature (223)..(223): n is a, c, g, or t
  misc_feature (241)..(242): n is a, c, g, or t
  misc_feature (249)..(249): n is a, c, g, or t
  misc_feature (254)..(254): n is a, c, g, or t
  misc_feature (281)..(281): n is a, c, g, or t
  misc_feature (317)..(317): n is a, c, g, or t
  misc_feature (385)..(385): n is a, c, g, or t
  misc_feature (448)..(448): n is a, c, g, or t
  misc_feature (491)..(491): n is a, c, g, or t
  misc_feature (594)..(594): n is a, c, g, or t
  misc_feature (656)..(656): n is a, c, g, or t
  misc_feature (678)..(678): n is a, c, g, or t
  misc_feature (701)..(701): n is a, c, g, or t
  misc_feature (726)..(726): n is a, c, g, or t
  misc_feature (740)..(740): n is a, c, g, or t
  misc_feature (824)..(824): n is a, c, g, or t
  misc_feature (844)..(844): n is a, c, g, or t
  misc_feature (870)..(870): n is a, c, g, or t
  misc_feature (890)..(890): n is a, c, g, or t
gaaaaaaaaaaaannataattttaatttttcccccatttnaagggaaatnggaaattaaanatnggttttnagcccaatggaaattaaaattaagaaggttgttttccaaaaacctttccctagagganaaccggccnataggngggggnagnatggaaggattttccagagaggaatcagtttggngagagaatttgataaggagttccttggaaccaaccnggagggggttttggtttnngggattnatcangatggttgtccttgggaagcataaggntggtttattattttggttaaaggggatgaagtaccntgtgttgcacttggtagcccaatgtcctgtcattgtgctttggatgtaggcagctttgaagggatttntcctgagaggatcttccggatcagagtatatcgccttttcttggtgaggccccatagtgggantccgcacttcaccatttcttttccgcccgccccagttcggttntaacccacccgcgtggccacgatcccagggacatagcgggacaggccccgcagtgcggtgacacacgtgggcacaccccacctgtgcagccggtggctcgcgntgaaggacacgaggcgcgacaatcgcgcgcggcgccgaaggccaaccgccgcgttcatggtnttcagaccaaagacccacaagntacgggttccggtttccgggacngaggccagcccggttcccccgcggntgcgcagtgcaaantcggccttccccgccggaagtactcctgggagcggtttcggcgcgtggcacttttcggtccacctggaggcaacactggcgccntttcctgtttcagtctttgntaggctataagtgaaagaccccacangtaggtttggcaagctagcnaaag

SEQ ID NO: 106 - DNA, 594 bp, Artificial Sequence
  Description of Artificial Sequence: Note = Synthetic Construct
  misc_feature (14)..(14): n is a, c, g, or t
  misc_feature (18)..(18): n is a, c, g, or t
  misc_feature (40)..(40): n is a, c, g, or t
  misc_feature (42)..(43): n is a, c, g, or t
  misc_feature (49)..(49): n is a, c, g, or t
  misc_feature (121)..(121): n is a, c, g, or t
  misc_feature (144)..(144): n is a, c, g, or t
  misc_feature (157)..(157): n is a, c, g, or t
  misc_feature (166)..(166): n is a, c, g, or t
  misc_feature (220)..(220): n is a, c, g, or t
  misc_feature (245)..(245): n is a, c, g, or t
  misc_feature (401)..(401): n is a, c, g, or t
  misc_feature (403)..(403): n is a, c, g, or t
  misc_feature (475)..(475): n is a, c, g, or t
  misc_feature (558)..(558): n is a, c, g, or t
  misc_feature (571)..(571): n is a, c, g, or t
ccattaatgggggngggnaaagggatagggatttgggccngnnggttantggggaagtgggattttaaggaattccccaaaaatattgattcttccaaagtattttccttcatttcccaanagagtaatttcaaaagccccagntttgtggaatcantttttgaanatatgaaaaggccctaatggtttcggcattattaaggcccgctgaggacactgntcaagttactcttggaaggcgtttntggcagaaacagaacagccccgttggcacggacagtgtccactgtttatctataaatcttttcaagcagatcttgcagccaactaggtacaagagtcggatggggatggggggcggggagtcagagaggtcggaacaatgaggcggaaaccaaaantntgaaacacgcccacctgaacaggacgaaagggtggggcttggtccacccagaaggaaacctcgaactccacntttcaaggtatccgctccgggttagcagccccggccaaacgcccctgctggcttctaacccaaccagctacgaaagcaggctngaccactagctgncctcgacttgaaagttcccacaa

SEQ ID NO: 107 - DNA, 586 bp, Artificial Sequence
  Description of Artificial Sequence: Note = Synthetic Construct
  misc_feature (8)..(8): n is a, c, g, or t
  misc_feature (37)..(37): n is a, c, g, or t
  misc_feature (51)..(51): n is a, c, g, or t
  misc_feature (86)..(86): n is a, c, g, or t
  misc_feature (171)..(171): n is a, c, g, or t
  misc_feature (190)..(190): n is a, c, g, or t
  misc_feature (193)..(193): n is a, c, g, or t
  misc_feature (235)..(235): n is a, c, g, or t
  misc_feature (415)..(415): n is a, c, g, or t
  misc_feature (417)..(417): n is a, c, g, or t
  misc_feature (442)..(442): n is a, c, g, or t
  misc_feature (489)..(489): n is a, c, g, or t
  misc_feature (537)..(537): n is a, c, g, or t
  misc_feature (566)..(566): n is a, c, g, or t
atccaatnattgggagtaggacaggggatcgggattngaggccagttgggntagtgggatgctgggaatcttaaggaatccccaanacatatggattcttccaaagtattttccatcaattccaaatagatgtatttcaaaagccccagctttgtggatcagtttttgcantatatgaaaaaggccttantgnttcgggattattaaggcccgctgaggacactgttagggcgcntcaagttattcttggaagggtttctggcagaaacagaacagccccgttggcacggacagtgtccactgtttatctataaatcttttcaagcagatcttgcagccaactaggtacaagagtcggatggggatggggggcggggagtcagagaggtcggaacaatgaggcggaaaccaaaantntgaaacacgcccacctgaacaggangaaagggtggggcttggtccacccagaaggaaacctcgaactccacnttcaaggtatccgctccgggttagcagcccgccaaacgccctgctggnttctacccaaccagctacgaaagcaggcngaccactagctgacctcgac

SEQ ID NO: 108 - DNA, 909 bp, Artificial Sequence
  Description of Artificial Sequence: Note = Synthetic Construct
  misc_feature (10)..(10): n is a, c, g, or t
  misc_feature (25)..(25): n is a, c, g, or t
  misc_feature (32)..(32): n is a, c, g, or t
  misc_feature (46)..(46): n is a, c, g, or t
  misc_feature (53)..(53): n is a, c, g, or t
  misc_feature (56)..(56): n is a, c, g, or t
  misc_feature (58)..(58): n is a, c, g, or t
  misc_feature (60)..(60): n is a, c, g, or t
  misc_feature (72)..(72): n is a, c, g, or t
  misc_feature (97)..(97): n is a, c, g, or t
  misc_feature (124)..(124): n is a, c, g, or t
  misc_feature (146)..(146): n is a, c, g, or t
  misc_feature (154)..(154): n is a, c, g, or t
  misc_feature (184)..(184): n is a, c, g, or t
  misc_feature (215)..(215): n is a, c, g, or t
  misc_feature (224)..(224): n is a, c, g, or t
  misc_feature (232)..(232): n is a, c, g, or t
  misc_feature (234)..(234): n is a, c, g, or t
  misc_feature (249)..(249): n is a, c, g, or t
  misc_feature (272)..(272): n is a, c, g, or t
  misc_feature (281)..(281): n is a, c, g, or t
  misc_feature (321)..(321): n is a, c, g, or t
  misc_feature (328)..(328): n is a, c, g, or t
  misc_feature (346)..(347): n is a, c, g, or t
  misc_feature (351)..(351): n is a, c, g, or t
  misc_feature (363)..(363): n is a, c, g, or t
  misc_feature (398)..(398): n is a, c, g, or t
  misc_feature (413)..(413): n is a, c, g, or t
  misc_feature (420)..(420): n is a, c, g, or t
  misc_feature (424)..(424): n is a, c, g, or t
  misc_feature (442)..(442): n is a, c, g, or t
  misc_feature (447)..(447): n is a, c, g, or t
  misc_feature (504)..(504): n is a, c, g, or t
  misc_feature (524)..(524): n is a, c, g, or t
  misc_feature (552)..(552): n is a, c, g, or t
  misc_feature (560)..(560): n is a, c, g, or t
  misc_feature (600)..(600): n is a, c, g, or t
  misc_feature (624)..(624): n is a, c, g, or t
  misc_feature (643)..(643): n is a, c, g, or t
  misc_feature (681)..(681): n is a, c, g, or t
  misc_feature (695)..(695): n is a, c, g, or t
  misc_feature (732)..(732): n is a, c, g, or t
  misc_feature (740)..(740): n is a, c, g, or t
  misc_feature (743)..(743): n is a, c, g, or t
  misc_feature (835)..(835): n is a, c, g, or t
  misc_feature (842)..(843): n is a, c, g, or t
  misc_feature (850)..(850): n is a, c, g, or t
  misc_feature (861)..(862): n is a, c, g, or t
  misc_feature (865)..(865): n is a, c, g, or t
  misc_feature (871)..(871): n is a, c, g, or t
  misc_feature (880)..(880): n is a, c, g, or t
  misc_feature (888)..(888): n is a, c, g, or t
  misc_feature (894)..(894): n is a, c, g, or t
  misc_feature (896)..(896): n is a, c, g, or t
  misc_feature (898)..(898): n is a, c, g, or t
ggggggttgnaaattgagaagcccncctttcntctttgttgtgaanacatttnccntncngggggatccctnggttccggaagggccgccttagttnttcttttcctccacctatgaaaggggngggagccgattaaaagaagggnggagcagngagggaagcggagcttcgcccgttttccgnacccttaaccctgcttgttcggggggggagngtgccaccnacccgggngnggtggcacggagatntgagggggagggatggtttgccntggccgctngtgggtgggcgggcaggcgccggcattcccggcaccttcngaagacngagccgggttcagggacnnacantccccgccaagngggaccaaccgcttcgggtgggttccccggttgtntggtgcccaggccgnacgccgngacngagggagacccaaggacntagantcaccggtgagcgggccggcgccggagagcggaaagaggagcgtagcacagcgcagntcggccagacgttgttcttntaccacccaccgagcgtttaaaaaaaanaaaaaaancccgcggcagcggactttttttgtagcggagcccgggcgngtcacttgccggaagtcccgcccntcgtttctgccaccgcccntcggttacctgggcaacggcgcgggggcggagagtggntgcgcccaagggcnttgtgggggtggactcaggcccgggttcccgatcctngtagaatnttntagaggctttttctttatgcgaggtaccagagggcggaagtcttgaggtggagaggtcatgtcccagagccgtaagccggggacgagtgctntcaggcnntgtgcanttgggatcctnnggnccaccntgagggtcntcacaaangaagcngncnagtaaaggagt

SEQ ID NO: 109 - DNA, 576 bp, Artificial Sequence
  Description of Artificial Sequence: Note = Synthetic Construct
  misc_feature (14)..(14): n is a, c, g, or t
  misc_feature (16)..(16): n is a, c, g, or t
  misc_feature (27)..(27): n is a, c, g, or t
  misc_feature (36)..(37): n is a, c, g, or t
  misc_feature (58)..(58): n is a, c, g, or t
  misc_feature (63)..(63): n is a, c, g, or t
  misc_feature (80)..(81): n is a, c, g, or t
  misc_feature (89)..(89): n is a, c, g, or t
  misc_feature (92)..(92): n is a, c, g, or t
  misc_feature (96)..(96): n is a, c, g, or t
  misc_feature (99)..(99): n is a, c, g, or t
  misc_feature (104)..(105): n is a, c, g, or t
  misc_feature (203)..(203): n is a, c, g, or t
  misc_feature (207)..(207): n is a, c, g, or t
  misc_feature (381)..(381): n is a, c, g, or t
  misc_feature (447)..(448): n is a, c, g, or t
ggcaccggggtaanangggggggagtngtcctgggnnccttgaacgctgggggaggantggtngggggctccaagggggnnggggaganctnaagntcntcaanntagagagggggaagctccccactctacatctgttgtcggagcacccccccacccagagggcgctgtcagtcatagactagagacctcccctcaagtgnctcnatccttccaatagacgagccctcttgacgcctttttcagagaattctctaatcctcgggtcacttccgcccccctgtcaagacttcacatatgtcctccacgcgagggggtgtctagaaccatcataagaatctctctgtcctcgttctttcctgtgataaaagccgcgggagnttccttttgggcgtctagatctccgtgctgagtgtctcgggagagcgcgcgacatcgcgtgtgaanngcgacctgtctccgcggagaatgggagtgtctgtgtgcagatgtcatagtgagaaaccaccgataagggtgatagggtaaaagatacttaaagggctatgaagaaagtggggaagggaggaggggaga

SEQ ID NO: 110 - DNA, 853 bp, Artificial Sequence
  Description of Artificial Sequence: Note = Synthetic Construct
  misc_feature (4)..(4): n is a, c, g, or t
  misc_feature (11)..(11): n is a, c, g, or t
  misc_feature (19)..(19): n is a, c, g, or t
  misc_feature (29)..(29): n is a, c, g, or t
  misc_feature (39)..(39): n is a, c, g, or t
  misc_feature (42)..(42): n is a, c, g, or t
  misc_feature (47)..(48): n is a, c, g, or t
  misc_feature (66)..(66): n is a, c, g, or t
  misc_feature (70)..(70): n is a, c, g, or t
  misc_feature (73)..(73): n is a, c, g, or t
  misc_feature (75)..(75): n is a, c, g, or t
  misc_feature (78)..(78): n is a, c, g, or t
  misc_feature (84)..(84): n is a, c, g, or t
  misc_feature (89)..(89): n is a, c, g, or t
  misc_feature (95)..(95): n is a, c, g, or t
  misc_feature (103)..(103): n is a, c, g, or t
  misc_feature (105)..(105): n is a, c, g, or t
  misc_feature (113)..(113): n is a, c, g, or t
  misc_feature (130)..(130): n is a, c, g, or t
  misc_feature (135)..(135): n is a, c, g, or t
  misc_feature (149)..(149): n is a, c, g, or t
  misc_feature (189)..(189): n is a, c, g, or t
  misc_feature (206)..(206): n is a, c, g, or t
  misc_feature (212)..(212): n is a, c, g, or t
  misc_feature (220)..(220): n is a, c, g, or t
  misc_feature (239)..(239): n is a, c, g, or t
  misc_feature (281)..(281): n is a, c, g, or t
  misc_feature (308)..(308): n is a, c, g, or t
  misc_feature (324)..(324): n is a, c, g, or t
  misc_feature (353)..(353): n is a, c, g, or t
  misc_feature (393)..(393): n is a, c, g, or t
  misc_feature (442)..(442): n is a, c, g, or t
  misc_feature (457)..(457): n is a, c, g, or t
  misc_feature (522)..(522): n is a, c, g, or t
  misc_feature (525)..(525): n is a, c, g, or t
  misc_feature (538)..(538): n is a, c, g, or t
  misc_feature (581)..(581): n is a, c, g, or t
  misc_feature (595)..(595): n is a, c, g, or t
  misc_feature (634)..(634): n is a, c, g, or t
  misc_feature (703)..(703): n is a, c, g, or t
  misc_feature (722)..(722): n is a, c, g, or t
  misc_feature (758)..(758): n is a, c, g, or t
aacnccccttncggggggnggggaaaaanaaagggggtnggnggaanntaaaccctagtttaaaangggntanangtntttaangggcnaaaagnttggtttnantcccaggngggtccctcctttgaanacccngaaaaattcatttncagaggggttggaagggggagccgaaaagaaaccccaacnacttcgcaagtaacaangggccnaagggagncagccgcaccttttttccnccccgcccaaaggccagccgcattcaccatgaacagatagangtaggaggcaaacaattccagttaatntggcggttgatggcancttcggattcttggtggtatttctggcgnatttgcgagggagacgcggtgttcatgatggcggctgggngaggcgcggaggcgacgctggagcggcggagcgacgaagttgcaaaggntcaggttcaaagcgnccggcggggtcggaggggtcgagcaccggttccgttcaagcactgttgaagcaggaaaccgcggngantctgggcgagaangtctggcgtagggaccagcgggccgcactttatagcgggatcntgcgtcaggcgcgntccggccaatcagcgcggtgggccgcccagccccgcttnttcctgtaggcgtgttgcccaagccagcagtgcgtgggcggggaggagcctgtgtgattgtgaggcgantcttggggttatgagctgntgcaagagcggtgcctggcaacaagcgggacgtttntgtggcccggggcggacgtagttggaaccagccgtactacagaggcattctgggtcccagagagtatcgataaggttgatttttaagtcccaccg

SEQ ID NO: 111 - DNA, 825 bp, Artificial Sequence
  Description of Artificial Sequence: Note = Synthetic Construct
  misc_feature (3)..(3): n is a, c, g, or t
  misc_feature (6)..(6): n is a, c, g, or t
  misc_feature (13)..(13): n is a, c, g, or t
  misc_feature (25)..(25): n is a, c, g, or t
  misc_feature (29)..(30): n is a, c, g, or t
  misc_feature (32)..(32): n is a, c, g, or t
  misc_feature (43)..(43): n is a, c, g, or t
  misc_feature (46)..(46): n is a, c, g, or t
  misc_feature (50)..(52): n is a, c, g, or t
  misc_feature (56)..(59): n is a, c, g, or t
  misc_feature (65)..(65): n is a, c, g, or t
  misc_feature (70)..(71): n is a, c, g, or t
  misc_feature (81)..(81): n is a, c, g, or t
  misc_feature (89)..(89): n is a, c, g, or t
  misc_feature (106)..(106): n is a, c, g, or t
  misc_feature (130)..(130): n is a, c, g, or t
  misc_feature (141)..(141): n is a, c, g, or t
  misc_feature (144)..(144): n is a, c, g, or t
  misc_feature (189)..(189): n is a, c, g, or t
  misc_feature (204)..(204): n is a, c, g, or t
  misc_feature (211)..(211): n is a, c, g, or t
  misc_feature (215)..(215): n is a, c, g, or t
  misc_feature (222)..(222): n is a, c, g, or t
  misc_feature (226)..(227): n is a, c, g, or t
  misc_feature (229)..(229): n is a, c, g, or t
  misc_feature (240)..(240): n is a, c, g, or t
  misc_feature (248)..(248): n is a, c, g, or t
  misc_feature (250)..(250): n is a, c, g, or t
  misc_feature (256)..(256): n is a, c, g, or t
  misc_feature (265)..(265): n is a, c, g, or t
  misc_feature (295)..(295): n is a, c, g, or t
  misc_feature (321)..(321): n is a, c, g, or t
  misc_feature (342)..(342): n is a, c, g, or t
  misc_feature (388)..(388): n is a, c, g, or t
  misc_feature (406)..(406): n is a, c, g, or t
  misc_feature (411)..(411): n is a, c, g, or t
  misc_feature (454)..(454): n is a, c, g, or t
  misc_feature (456)..(456): n is a, c, g, or t
  misc_feature (496)..(496): n is a, c, g, or t
  misc_feature (501)..(501): n is a, c, g, or t
  misc_feature (523)..(523): n is a, c, g, or t
  misc_feature (529)..(529): n is a, c, g, or t
  misc_feature (579)..(579): n is a, c, g, or t
  misc_feature (609)..(609): n is a, c, g, or t
  misc_feature (614)..(614): n is a, c, g, or t
  misc_feature (621)..(621): n is a, c, g, or t
  misc_feature (629)..(629): n is a, c, g, or t
  misc_feature (637)..(637): n is a, c, g, or t
  misc_feature (640)..(640): n is a, c, g, or t
  misc_feature (654)..(654): n is a, c, g, or t
  misc_feature (694)..(694): n is a, c, g, or t
ggnttncaggggnaccccccccccncttnnantttgtccacgnaanattnnngccnnnnaagganggggnngggaagtttnagggcaangaaaagggaaaagtttngtttggacaaaccttgaaaggggntttatcgcaanacnccgggggggggtttttttgaaagagaaggggaaaagattcggaancctgatttttttggnttgagtnaagngggggangggnngnaaaaattaaanggattccngngggggngactagtantttaggggggagaaaagggttttataaggncccataaagttcagcggaaagccggntccggggaagaccacccatgngttttaattagagtgcaacgggttgaagagcccaggaagcccaganactagggtgagtcaccgngaaantaacagaccataaaaggaaggatgcagaacagaccagggtacnantcacaggccacttggcaggaagagatagcccccagccccngaatncagagccccaacctgccaatgnggtagntataccttattacttcatcatgtgaatagccaatcatatgtgaacatgtntatgtgcttcgtttgaatccaccaatcccngtaantatgatntgttctgnacgcccgnttntgttccccaatccntataaaagccccatgctggagctgctgggcgcgcaagtcntccgaagagactgtgtgcccgcaggtacctgtgttttccaataaaccctcttgctgattgcatccgagtggactcggctcggtcattgggcgcttgggactcctcctgagggaaagtcctctctggggtct

SEQ ID NO: 112 - DNA, 861 bp, Artificial Sequence
  Description of Artificial Sequence: Note = Synthetic Construct
  misc_feature (2)..(3): n is a, c, g, or t
  misc_feature (11)..(11): n is a, c, g, or t
  misc_feature (15)..(16): n is a, c, g, or t
  misc_feature (18)..(20): n is a, c, g, or t
  misc_feature (23)..(23): n is a, c, g, or t
  misc_feature (31)..(31): n is a, c, g, or t
  misc_feature (43)..(43): n is a, c, g, or t
  misc_feature (52)..(54): n is a, c, g, or t
  misc_feature (64)..(64): n is a, c, g, or t
  misc_feature (68)..(68): n is a, c, g, or t
  misc_feature (87)..(87): n is a, c, g, or t
  misc_feature (94)..(94): n is a, c, g, or t
  misc_feature (97)..(98): n is a, c, g, or t
  misc_feature (103)..(106): n is a, c, g, or t
  misc_feature (124)..(124): n is a, c, g, or t
  misc_feature (128)..(128): n is a, c, g, or t
  misc_feature (130)..(131): n is a, c, g, or t
  misc_feature (146)..(146): n is a, c, g, or t
  misc_feature (152)..(152): n is a, c, g, or t
  misc_feature (161)..(161): n is a, c, g, or t
  misc_feature (163)..(163): n is a, c, g, or t
  misc_feature (165)..(165): n is a, c, g, or t
  misc_feature (195)..(195): n is a, c, g, or t
  misc_feature (198)..(198): n is a, c, g, or t
  misc_feature (222)..(223): n is a, c, g, or t
  misc_feature (227)..(227): n is a, c, g, or t
  misc_feature (231)..(231): n is a, c, g, or t
  misc_feature (242)..(242): n is a, c, g, or t
  misc_feature (251)..(251): n is a, c, g, or t
  misc_feature (258)..(259): n is a, c, g, or t
  misc_feature (261)..(261): n is a, c, g, or t
  misc_feature (266)..(266): n is a, c, g, or t
  misc_feature (281)..(281): n is a, c, g, or t
  misc_feature (290)..(290): n is a, c, g, or t
  misc_feature (302)..(302): n is a, c, g, or t
  misc_feature (322)..(322): n is a, c, g, or t
  misc_feature (331)..(331): n is a, c, g, or t
  misc_feature (333)..(333): n is a, c, g, or t
  misc_feature (335)..(335): n is a, c, g, or t
  misc_feature (345)..(345): n is a, c, g, or t
  misc_feature (350)..(350): n is a, c, g, or t
  misc_feature (381)..(381): n is a, c, g, or t
  misc_feature (388)..(388): n is a, c, g, or t
  misc_feature (401)..(401): n is a, c, g, or t
  misc_feature (436)..(436): n is a, c, g, or t
  misc_feature (440)..(440): n is a, c, g, or t
  misc_feature (467)..(467): n is a, c, g, or t
  misc_feature (481)..(481): n is a, c, g, or t
  misc_feature (493)..(493): n is a, c, g, or t
  misc_feature (503)..(503): n is a, c, g, or t
  misc_feature (526)..(526): n is a, c, g, or t
  misc_feature (533)..(533): n is a, c, g, or t
  misc_feature (536)..(537): n is a, c, g, or t
  misc_feature (544)..(544): n is a, c, g, or t
  misc_feature (548)..(548): n is a, c, g, or t
  misc_feature (575)..(575): n is a, c, g, or t
  misc_feature (584)..(584): n is a, c, g, or t
  misc_feature (592)..(593): n is a, c, g, or t
  misc_feature (596)..(596): n is a, c, g, or t
  misc_feature (607)..(607): n is a, c, g, or t
  misc_feature (610)..(610): n is a, c, g, or t
  misc_feature (643)..(643): n is a, c, g, or t
  misc_feature (649)..(649): n is a, c, g, or t
  misc_feature (669)..(669): n is a, c, g, or t
  misc_feature (672)..(673): n is a, c, g, or t
  misc_feature (677)..(677): n is a, c, g, or t
  misc_feature (681)..(681): n is a, c, g, or t
  misc_feature (684)..(685): n is a, c, g, or t
  misc_feature (689)..(689): n is a, c, g, or t
  misc_feature (693)..(693): n is a, c, g, or t
  misc_feature (712)..(712): n is a, c, g, or t
  misc_feature (715)..(716): n is a, c, g, or t
  misc_feature (733)..(733): n is a, c, g, or t
  misc_feature (741)..(741): n is a, c, g, or t
  misc_feature (759)..(759): n is a, c, g, or t
  misc_feature (764)..(764): n is a, c, g, or t
  misc_feature (771)..(771): n is a, c, g, or t
  misc_feature (785)..(785): n is a, c, g, or t
  misc_feature (788)..(788): n is a, c, g, or t
  misc_feature (794)..(794): n is a, c, g, or t
  misc_feature (796)..(796): n is a, c, g, or t
  misc_feature (810)..(810): n is a, c, g, or t
  misc_feature (819)..(819): n is a, c, g, or t
  misc_feature (821)..(821): n is a, c, g, or t
  misc_feature (823)..(823): n is a, c, g, or t
  misc_feature (826)..(826): n is a, c, g, or t
  misc_feature (845)..(845): n is a, c, g, or t
  misc_feature (855)..(855): n is a, c, g, or t
anngaaacatncccnncnnnttnatcctttnggaaaagggcancccaaaggnnnggaacggatngaanaattctttcaaaaagaganatcgganggnnatcgnnnnggttttcaagtccccccngagnannaaaattgagtcagtngggggnaaccgacgnananaggaacaggtttcccgggagtccttgggtntcngttcgacccccggaaaccgaactnncgcntttncctttgggagnggggatttntaaaggnnancgggngtatttccattcggntagttgttngttcaagggggntgccggacggaccccctttnagccagacngngnccctatccgnaaaantgttggggtccaacccggtaagacagatttntcgccantgccagcagccantggtaacaggattagcagagagaggtatgtagacngtgnacagattaaggaagtggtggcgtaagnacggacacattagnaggacagtatgnggtatctgcnctcggttgaagccagttaccttnggataanganntggtagntttngatcccggcagacaaaccaccgttggnagcggtggntcctttgnntgnaagcagcagantangcgcagaaaaaaaggatctcgagaagatcctangatatnttgttcggggtcagacgctnaannggtntggnatnntgancggntgaccatagagcacagtantgnngattgcagtccgccccnaggacganaggagaccaggggcccangctgnagtaacnaatcaactaccctnacnagatgnancagagagagagagnaccgtatantnantgnaagagaggtcccggtttcnagttcccagnacggaa

SEQ ID NO: 113 - DNA, 149 bp, Artificial Sequence
  Description of Artificial Sequence: Note = Synthetic Construct
  misc_feature (4)..(4): n is a, c, g, or t
attngaggagatccggttactaaggatatagaagaaaaaaataaatcgtgtgcctgcctttttttttttaattgcctgcttctccccacccccaaattaagttgcttagcaagggggaaagaggcttttcctcccttcagtaggtcagc

SEQ ID NO: 114 - DNA, 857 bp, Artificial Sequence
  Description of Artificial Sequence: Note = Synthetic Construct
  misc_feature (16)..(16): n is a, c, g, or t
  misc_feature (20)..(20): n is a, c, g, or t
  misc_feature (23)..(24): n is a, c, g, or t
  misc_feature (27)..(28): n is a, c, g, or t
  misc_feature (30)..(30): n is a, c, g, or t
  misc_feature (40)..(40): n is a, c, g, or t
  misc_feature (54)..(54): n is a, c, g, or t
  misc_feature (58)..(58): n is a, c, g, or t
  misc_feature (60)..(60): n is a, c, g, or t
  misc_feature (65)..(65): n is a, c, g, or t
  misc_feature (74)..(74): n is a, c, g, or t
  misc_feature (80)..(80): n is a, c, g, or t
  misc_feature (86)..(86): n is a, c, g, or t
  misc_feature (90)..(90): n is a, c, g, or t
  misc_feature (92)..(92): n is a, c, g, or t
  misc_feature (94)..(94): n is a, c, g, or t
  misc_feature (100)..(100): n is a, c, g, or t
  misc_feature (102)..(102): n is a, c, g, or t
  misc_feature (107)..(107): n is a, c, g, or t
  misc_feature (113)..(113): n is a, c, g, or t
  misc_feature (128)..(128): n is a, c, g, or t
  misc_feature (130)..(130): n is a, c, g, or t
  misc_feature (134)..(134): n is a, c, g, or t
  misc_feature (147)..(147): n is a, c, g, or t
  misc_feature (152)..(152): n is a, c, g, or t
  misc_feature (163)..(163): n is a, c, g, or t
  misc_feature (174)..(174): n is a, c, g, or t
  misc_feature (190)..(190): n is a, c, g, or t
  misc_feature (196)..(196): n is a, c, g, or t
  misc_feature (202)..(202): n is a, c, g, or t
  misc_feature (217)..(217): n is a, c, g, or t
  misc_feature (221)..(221): n is a, c, g, or t
  misc_feature (230)..(230): n is a, c, g, or t
  misc_feature (233)..(233): n is a, c, g, or t
  misc_feature (240)..(240): n is a, c, g, or t
  misc_feature (244)..(244): n is a, c, g, or t
  misc_feature (277)..(277): n is a, c, g, or t
  misc_feature (290)..(290): n is a, c, g, or t
  misc_feature (338)..(338): n is a, c, g, or t
  misc_feature (347)..(347): n is a, c, g, or t
  misc_feature (350)..(350): n is a, c, g, or t
  misc_feature (352)..(352): n is a, c, g, or t
  misc_feature (369)..(369): n is a, c, g, or t
  misc_feature (378)..(379): n is a, c, g, or t
  misc_feature (390)..(390): n is a, c, g, or t
  misc_feature (406)..(406): n is a, c, g, or t
  misc_feature (422)..(422): n is a, c, g, or t
  misc_feature (469)..(469): n is a, c, g, or t
  misc_feature (483)..(484): n is a, c, g, or t
  misc_feature (506)..(506): n is a, c, g, or t
  misc_feature (509)..(509): n is a, c, g, or t
  misc_feature (540)..(540): n is a, c, g, or t
  misc_feature (551)..(551): n is a, c, g, or t
  misc_feature (570)..(570): n is a, c, g, or t
  misc_feature (600)..(600): n is a, c, g, or t
  misc_feature (602)..(602): n is a, c, g, or t
  misc_feature (605)..(605): n is a, c, g, or t
  misc_feature (664)..(664): n is a, c, g, or t
  misc_feature (708)..(708): n is a, c, g, or t
gatctggtcttgcccngganganntcnntnccgggggggntaaaaaagaattgntggngntgacnagggggganaccccntaccgngggncnancggaantnttggncaccgnaaaaaatttccaggngnacangaacgggtgcggngggantagggggaaangtttggagtgngccaaaacggaaaagnagacgnttgtangggttgggaaccagnaccntggaaagantgnagttctnatcngcaacaaccaccggaggtagggggttttttgtngcagcacagatangcgcagaaaaaaggatttcaggagatcctttgatttttattcgggtangacgttcangtngnggggattgggagcgganaaccatttnnacacaggattntatgaactatggtcanttgctttgttgtccangtcgttgtgggattgctgtttttagtagctgcaaacggttcgttttntgctatctttgttnngataaatcagccccgggcaganganattcgaaagttccctttaggagcttatttanacgggctcaangccaccggtttcgtttttntaggcacgttctgcgcattttttttttttngnatntttggatcgcgtttcgtgggatcttaaaaaccgttttctgtgattggcacgcaagaaanactcatgagctggtccctgttgtgtctctcaggaccaatcaaanacccatttccaacggctttataatgtctggttctgtttgcacaggaagcgaagtcacggcttgcacccgtgaagtctggggaggttcagagctgggaactgcccagaggaaggggttcggggctacagccatcaatcttccagttgttt

SEQ ID NO: 115 - DNA, 1630 bp, Artificial Sequence
  Description of Artificial Sequence: Note = Synthetic Construct
  misc_feature (20)..(20): n is a, c, g, or t
  misc_feature (23)..(23): n is a, c, g, or t
  misc_feature (31)..(31): n is a, c, g, or t
  misc_feature (43)..(43): n is a, c, g, or t
  misc_feature (51)..(51): n is a, c, g, or t
  misc_feature (56)..(56): n is a, c, g, or t
  misc_feature (73)..(74): n is a, c, g, or t
  misc_feature (76)..(76): n is a, c, g, or t
  misc_feature (92)..(92): n is a, c, g, or t
  misc_feature (95)..(95): n is a, c, g, or t
  misc_feature (103)..(103): n is a, c, g, or t
  misc_feature (116)..(116): n is a, c, g, or t
  misc_feature (122)..(123): n is a, c, g, or t
  misc_feature (128)..(129): n is a, c, g, or t
  misc_feature (135)..(135): n is a, c, g, or t
  misc_feature (137)..(137): n is a, c, g, or t
  misc_feature (145)..(145): n is a, c, g, or t
  misc_feature (154)..(154): n is a, c, g, or t
  misc_feature (162)..(162): n is a, c, g, or t
  misc_feature (173)..(174): n is a, c, g, or t
  misc_feature (187)..(187): n is a, c, g, or t
  misc_feature (209)..(209): n is a, c, g, or t
  misc_feature (230)..(230): n is a, c, g, or t
  misc_feature (235)..(235): n is a, c, g, or t
  misc_feature (245)..(245): n is a, c, g, or t
  misc_feature (249)..(250): n is a, c, g, or t
  misc_feature (266)..(266): n is a, c, g, or t
  misc_feature (284)..(284): n is a, c, g, or t
  misc_feature (412)..(412): n is a, c, g, or t
  misc_feature (440)..(440): n is a, c, g, or t
  misc_feature (731)..(731): n is a, c, g, or t
ccccccccccccccaaaaanaanaattaccnttttaccattgnggttcccngtccntgataaatttttaaccnncntttttccttaaaaaancgnatcctgangggatttccgttnaatggnnttaanncttttngngaatgttnaccccaatnttcccctnaattttgagtnngataattgcttanaggcatttggaaatttaacggncacctgaggttgattggttgntattnaacggacttngatnngaggaaggcccccaanattttgttccattccttntaagtttgggacttggaaatcccgttgtttagatcttgaccgtaatcaggagtcagcgtagaggaggccccggaaggagggcccagcgcggattcgcccgcggcagggcggggaccaacagagggccntcggggataggggagcgccgccccgccntcccggggaaggacacattgcttgttagcaggaagccagccagacccggaggaggccgctccagcgttggtgttgccggtccggggctagcctgatccgggcagggtgagttgagacgatcgggtgagcttgggccggggacgccagcgtcttcagtcctggggattgtcccaggagggcaaggagcttggaggagggaggccgcacagctaggggagtcaggtctgagtcccgagtgtgctctaaagccggggcggtgagagtggcggcccgcccggggccgcgcagcgngcagtctcccccgcgtgggaagtggtaacttaacgcacagccacaggattcccggcctttagctgctggagggagggtggcttctcccggaggagtctgttgtgaaactcggttggagggcaccgtgggtgcgggcaagggagagatggggtcgccctgaagaagtggggggctggagtagaaagtggactttgtgcaaacctcaccccagagtagttagttaccaaggctggtttttttttttttttttttttgctcagacacaaggaaaatttgactcaatgttaaaatatgtaatttggcaggaaaacttttttcctagcctccttgctaatatagttggaacagggggctcccaagaggtatagagtcccccattttacaaaatgtggttcagtgggactgtggcccacccagtcgtgtatccatggaagagtggcttttatggagaagttcattttccttaaccttaaaaactgtaaaggatcttgtgcttgagaatattgttggccagctttatagtcttcatttataaaactatttagactagagtgttatagattataggtcttcaagtttccagtcaccagtccttggctttttagtatggaaatcaccagtaatggcaatataacatccctgcttctgtttcttagaaggctaaattacagtgtgttcaaactccgtgtcattgcaacaggttaaactaactttatacgtaggacatcagggtattgacattctcatcctaaagtcagtttgtctgtttccagaggaggaactgaagcagtggttctttaagtaactgactcagggctttcctgcctggcgcgcctgccaggcatagtgtagcattgtactgcatcttctttgaccagtttccccaggtgaagagcctg

SEQ ID NO: 116 - DNA, 883 bp, Artificial Sequence
  Description of Artificial Sequence: Note = Synthetic Construct
  misc_feature (23)..(23): n is a, c, g, or t
  misc_feature (37)..(37): n is a, c, g, or t
  misc_feature (41)..(41): n is a, c, g, or t
  misc_feature (51)..(51): n is a, c, g, or t
  misc_feature (54)..(54): n is a, c, g, or t
  misc_feature (66)..(67): n is a, c, g, or t
  misc_feature (73)..(73): n is a, c, g, or t
  misc_feature (80)..(80): n is a, c, g, or t
  misc_feature (86)..(86): n is a, c, g, or t
  misc_feature (94)..(94): n is a, c, g, or t
  misc_feature (99)..(99): n is a, c, g, or t
  misc_feature (114)..(114): n is a, c, g, or t
  misc_feature (132)..(132): n is a, c, g, or t
  misc_feature (139)..(140): n is a, c, g, or t
  misc_feature (151)..(151): n is a, c, g, or t
  misc_feature (169)..(169): n is a, c, g, or t
  misc_feature (194)..(194): n is a, c, g, or t
  misc_feature (207)..(207): n is a, c, g, or t
  misc_feature (212)..(212): n is a, c, g, or t
  misc_feature (223)..(223): n is a, c, g, or t
  misc_feature (225)..(226): n is a, c, g, or t
  misc_feature (279)..(279): n is a, c, g, or t
  misc_feature (313)..(313): n is a, c, g, or t
  misc_feature (332)..(332): n is a, c, g, or t
  misc_feature (423)..(423): n is a, c, g, or t
  misc_feature (438)..(438): n is a, c, g, or t
  misc_feature (470)..(470): n is a, c, g, or t
  misc_feature (512)..(512): n is a, c, g, or t
  misc_feature (525)..(525): n is a, c, g, or t
  misc_feature (591)..(591): n is a, c, g, or t
  misc_feature (635)..(635): n is a, c, g, or t
  misc_feature (669)..(669): n is a, c, g, or t
  misc_feature (671)..(671): n is a, c, g, or t
aaaaattgtaaggagttgggggnatcccccataattnaaanagggaacaanccntaaagggagggnngggaanggccaanattggnttaaaaanagtangtttggttgatccanacacaaggaatttgttanaattttnntaatggaaatngggcacttcaattgggangataaaaccccaggaagtgataccngggttatcaagtnaaacntgattcttggngnngagggaaaggatattgaatttgagtgagtgcaggtgaagtgagacttgggagnacaggtcatgcccacccaagggaggagcaagggntgggcagtgtaggtggtgnggtggtccttcctggggtgggcggggagacagatgagaacgttattggaggacaggcacaagtgttactgaaatgcaaatccctgtagatntggaaaagttctggnttcaggcttgatgcttgggccggcaactgtgnactttccctgtacgttcagcccccccacccttacggaagttntcgtcactgagantagtggctaatcagagtcttcaatggacctgccaatcagaaaggaaggcgggcttttccgggtgcntaggtgtaggattcgctcagtagttaagcagtcttaactggttntggctgctgtgctctctgtcctgccgttggattntntgaggcatgttcaggcaagctccaaagttgcgacatggtgagcacaggggcagggggggcgggcggacgggcaggggactgagcagtgggagctggtgtggtgggtctttcccggggctgagttggaatccgcggctacccgtgaggtcttagccactcactagacccagcggcagtttctgaataactttccttgtaggggctgcaactct

SEQ ID NO: 117 - DNA, 913 bp, Artificial Sequence
  Description of Artificial Sequence: Note = Synthetic Construct
  misc_feature (9)..(9): n is a, c, g, or t
  misc_feature (24)..(24): n is a, c, g, or t
  misc_feature (33)..(33): n is a, c, g, or t
  misc_feature (40)..(40): n is a, c, g, or t
  misc_feature (47)..(47): n is a, c, g, or t
  misc_feature (50)..(50): n is a, c, g, or t
  misc_feature (64)..(64): n is a, c, g, or t
  misc_feature (69)..(69): n is a, c, g, or t
  misc_feature (73)..(73): n is a, c, g, or t
  misc_feature (81)..(81): n is a, c, g, or t
  misc_feature (87)..(87): n is a, c, g, or t
  misc_feature (95)..(95): n is a, c, g, or t
  misc_feature (101)..(101): n is a, c, g, or t
  misc_feature (109)..(109): n is a, c, g, or t
  misc_feature (120)..(120): n is a, c, g, or t
  misc_feature (127)..(127): n is a, c, g, or t
  misc_feature (131)..(131): n is a, c, g, or t
  misc_feature (147)..(147): n is a, c, g, or t
  misc_feature (150)..(151): n is a, c, g, or t
  misc_feature (166)..(166): n is a, c, g, or t
  misc_feature (183)..(183): n is a, c, g, or t
  misc_feature (186)..(186): n is a, c, g, or t
  misc_feature (226)..(226): n is a, c, g, or t
  misc_feature (238)..(238): n is a, c, g, or t
  misc_feature (249)..(249): n is a, c, g, or t
  misc_feature (266)..(266): n is a, c, g, or t
  misc_feature (268)..(268): n is a, c, g, or t
  misc_feature (286)..(286): n is a, c, g, or t
  misc_feature (296)..(296): n is a, c, g, or t
  misc_feature (310)..(310): n is a, c, g, or t
  misc_feature (312)..(312): n is a, c, g, or t
  misc_feature (347)..(347): n is a, c, g, or t
  misc_feature (357)..(357): n is a, c, g, or t
  misc_feature (378)..(378): n is a, c, g, or t
  misc_feature (399)..(399): n is a, c, g, or t
  misc_feature (431)..(431): n is a, c, g, or t
  misc_feature (485)..(485): n is a, c, g, or t
  misc_feature (514)..(514): n is a, c, g, or t
  misc_feature (566)..(566): n is a, c, g, or t
  misc_feature (575)..(575): n is a, c, g, or t
  misc_feature (586)..(587): n is a, c, g, or t
  misc_feature (598)..(598): n is a, c, g, or t
  misc_feature (602)..(602): n is a, c, g, or t
  misc_feature (622)..(622): n is a, c, g, or t
  misc_feature (630)..(631): n is a, c, g, or t
ttccccccnagaaaaatatttttngggacccanaaaaaanggtcccnggncctgttttcttccncccgnaaanaacttccntttccntggggggntttaanaaaagaanatttcattggnggttttntccnagggggggagaccccnttnnccgcgggcctttcgnaattttttggtccaccngtnaaagattttcccatggcgcaccatgtacgggttgcgaggngtattaggcggnaacggtttttnagtgggcctaatacggnanataggaggacgatttgtnttggtttgtngagccagtaccttngnaaagagttgtagttttgatccggcaaccaaccacngttgtagcgnggttttttgttgaagcagcantaacgcgcagaaaaaaggatntcaggagatcctttgatttttcttcgggttcngacgttatgttgtgtggattgtgagcggataacaatttcacacagattccgatngtagtccaatttgttaaagacaggatatntttcccttcaaagaaaacagaaaaatacagaaacgttaattttcaaatctcnaatctttcnttctctcttcnntcattcattcnttcnttctttcttctttctttctntctttctnnagaggaggcatgctagggtaacagtagctcattttaaaatctggcacctggaattaatttagggacaaaacacctttatgcaaaaaaaagtttatgtttttccatggaacacagtaaaatcaaaattaaaagaatataacaaaggctttggtgatttggtaggattttttttttcctggaggggaaaacagatgacttggaaagtgttaggaacatatcaagccccagggaaagaaaaacgtttgattggtattaattaaaacactgctaatatattctaat

SEQ ID NO: 118 - DNA, 320 bp, Artificial Sequence
  Description of Artificial Sequence: Note = Synthetic Construct
  misc_feature (193)..(193): n is a, c, g, or t
  misc_feature (304)..(304): n is a, c, g, or t
  misc_feature (308)..(308): n is a, c, g, or t
tatgcacccatgacacaagatcacagaagtacaggcctggaccatggcagagtatacactggttgggtaaatgaagaggagagacagagtgggaagtcggcttagtggatatggacttcaaatttgatgaacaagcaattcaaatgagtatcgtgggcttgactggtatgaagacccgtttgcaaagcagtgntcataagagagaaaagagagagagagagagagagagagagagagagagagaaagagagagagtgtgtgttgttgttgttgttgttgttgtttattggtttataacaagatntacntttggtaacttt

SEQ ID NO: 119 - DNA, 389 bp, Artificial Sequence
  Description of Artificial Sequence: Note = Synthetic Construct
  misc_feature (8)..(8): n is a, c, g, or t
  misc_feature (11)..(11): n is a, c, g, or t
  misc_feature (29)..(29): n is a, c, g, or t
  misc_feature (31)..(31): n is a, c, g, or t
  misc_feature (39)..(40): n is a, c, g, or t
  misc_feature (44)..(44): n is a, c, g, or t
  misc_feature (52)..(52): n is a, c, g, or t
  misc_feature (54)..(54): n is a, c, g, or t
  misc_feature (56)..(56): n is a, c, g, or t
  misc_feature (63)..(63): n is a, c, g, or t
  misc_feature (67)..(67): n is a, c, g, or t
  misc_feature (69)..(70): n is a, c, g, or t
  misc_feature (72)..(72): n is a, c, g, or t
  misc_feature (76)..(76): n is a, c, g, or t
  misc_feature (83)..(83): n is a, c, g, or t
  misc_feature (88)..(88): n is a, c, g, or t
  misc_feature (92)..(92): n is a, c, g, or t
  misc_feature (105)..(105): n is a, c, g, or t
  misc_feature (108)..(108): n is a, c, g, or t
  misc_feature (112)..(112): n is a, c, g, or t
  misc_feature (138)..(138): n is a, c, g, or t
  misc_feature (143)..(143): n is a, c, g, or t
  misc_feature (148)..(148): n is a, c, g, or t
  misc_feature (151)..(151): n is a, c, g, or t
  misc_feature (157)..(157): n is a, c, g, or t
  misc_feature (180)..(180): n is a, c, g, or t
  misc_feature (188)..(188): n is a, c, g, or t
  misc_feature (205)..(205): n is a, c, g, or t
  misc_feature (222)..(222): n is a, c, g, or t
  misc_feature (224)..(224): n is a, c, g, or t
  misc_feature (230)..(230): n is a, c, g, or t
  misc_feature (247)..(247): n is a, c, g, or t
  misc_feature (275)..(275): n is a, c, g, or t
  misc_feature (279)..(279): n is a, c, g, or t
  misc_feature (285)..(285): n is a, c, g, or t
  misc_feature (292)..(292): n is a, c, g, or t
  misc_feature (305)..(305): n is a, c, g, or t
  misc_feature (310)..(310): n is a, c, g, or t
  misc_feature (320)..(321): n is a, c, g, or t
  misc_feature (324)..(324): n is a, c, g, or t
  misc_feature (335)..(335): n is a, c, g, or t
  misc_feature (353)..(353): n is a, c, g, or t
  misc_feature (368)..(368): n is a, c, g, or t
  misc_feature (378)..(378): n is a, c, g, or t
  misc_feature (383)..(383): n is a, c, g, or t
gggggggngcnaaaagggtctttcttttnanaaaaatcnngganggaggccncnanacggctnttananntnttcngggtgtncctcnccgntgtggggaatganatntcgntctcgacatcaggggattggagattntctgngctcnccnctcacnacccagaagaagcgcacagagancagagtancacatcatacacacctnttcagctacagagcgantnctctanaaggggactcggggganaacacaaccctcctcctcttctgactgngagngccgcntgtaggntctgtctacccancaagncttgtgcagnntgngaacctctctntggggtagagtgtgttgngggagcagggcgtantgttccaggnctagnctttca

SEQ ID NO: 120 - DNA, 882 bp, Artificial Sequence
  Description of Artificial Sequence: Note = Synthetic Construct
  misc_feature (3)..(3): n is a, c, g, or t
  misc_feature (11)..(11): n is a, c, g, or t
  misc_feature (15)..(15): n is a, c, g, or t
  misc_feature (18)..(19): n is a, c, g, or t
  misc_feature (23)..(23): n is a, c, g, or t
  misc_feature (27)..(27): n is a, c, g, or t
  misc_feature (35)..(35): n is a, c, g, or t
  misc_feature (38)..(38): n is a, c, g, or t
  misc_feature (41)..(41): n is a, c, g, or t
  misc_feature (47)..(48): n is a, c, g, or t
  misc_feature (50)..(51): n is a, c, g, or t
  misc_feature (59)..(59): n is a, c, g, or t
  misc_feature (62)..(62): n is a, c, g, or t
  misc_feature (72)..(72): n is a, c, g, or t
  misc_feature (75)..(77): n is a, c, g, or t
  misc_feature (84)..(84): n is a, c, g, or t
  misc_feature (86)..(86): n is a, c, g, or t
  misc_feature (91)..(93): n is a, c, g, or t
  misc_feature (103)..(103): n is a, c, g, or t
  misc_feature (106)..(106): n is a, c, g, or t
  misc_feature (108)..(108): n is a, c, g, or t
  misc_feature (112)..(112): n is a, c, g, or t
  misc_feature (116)..(116): n is a, c, g, or t
  misc_feature (119)..(121): n is a, c, g, or t
  misc_feature (124)..(125): n is a, c, g, or t
  misc_feature (133)..(133): n is a, c, g, or t
  misc_feature (140)..(141): n is a, c, g, or t
  misc_feature (143)..(143): n is a, c, g, or t
  misc_feature (157)..(157): n is a, c, g, or t
  misc_feature (162)..(162): n is a, c, g, or t
  misc_feature (174)..(174): n is a, c, g, or t
  misc_feature (176)..(176): n is a, c, g, or t
  misc_feature (181)..(181): n is a, c, g, or t
  misc_feature (184)..(184): n is a, c, g, or t
  misc_feature (191)..(191): n is a, c, g, or t
  misc_feature (197)..(198): n is a, c, g, or t
  misc_feature (200)..(200): n is a, c, g, or t
  misc_feature (213)..(214): n is a, c, g, or t
  misc_feature (221)..(221): n is a, c, g, or t
  misc_feature (242)..(242): n is a, c, g, or t
  misc_feature (249)..(249): n is a, c, g, or t
  misc_feature (251)..(251): n is a, c, g, or t
  misc_feature (255)..(256): n is a, c, g, or t
  misc_feature (261)..(261): n is a, c, g, or t
  misc_feature (281)..(281): n is a, c, g, or t
  misc_feature (292)..(292): n is a, c, g, or t
  misc_feature (297)..(297): n is a, c, g, or t
  misc_feature (318)..(318): n is a, c, g, or t
  misc_feature (320)..(320): n is a, c, g, or t
  misc_feature (329)..(329): n is a, c, g, or t
  misc_feature (335)..(335): n is a, c, g, or t
  misc_feature (344)..(344): n is a, c, g, or t
  misc_feature (347)..(349): n is a, c, g, or t
  misc_feature (355)..(355): n is a, c, g, or t
  misc_feature (364)..(364): n is a, c, g, or t
  misc_feature (368)..(368): n is a, c, g, or t
  misc_feature (374)..(374): n is a, c, g, or t
  misc_feature (390)..(390): n is a, c, g, or t
  misc_feature (394)..(394): n is a, c, g, or t
  misc_feature (407)..(407): n is a, c, g, or t
  misc_feature (411)..(411): n is a, c, g, or t
  misc_feature (413)..(413): n is a, c, g, or t
  misc_feature (425)..(426): n is a, c, g, or t
  misc_feature (428)..(428): n is a, c, g, or t
  misc_feature (434)..(434): n is a, c, g, or t
  misc_feature (439)..(439): n is a, c, g, or t
  misc_feature (443)..(443): n is a, c, g, or t
  misc_feature (447)..(447): n is a, c, g, or t
  misc_feature (452)..(452): n is a, c, g, or t
  misc_feature (472)..(472): n is a, c, g, or t
  misc_feature (474)..(474): n is a, c, g, or t
  misc_feature (478)..(478): n is a, c, g, or t
  misc_feature (480)..(480): n is a, c, g, or t
  misc_feature (482)..(482): n is a, c, g, or t
  misc_feature (490)..(490): n is a, c, g, or t
  misc_feature (492)..(492): n is a, c, g, or t
  misc_feature (495)..(495): n is a, c, g, or t
  misc_feature (498)..(498): n is a, c, g, or t
  misc_feature (514)..(514): n is a, c, g, or t
  misc_feature (520)..(520): n is a, c, g, or t
  misc_feature (533)..(534): n is a, c, g, or t
  misc_feature (540)..(540): n is a, c, g, or t
  misc_feature (544)..(544): n is a, c, g, or t
  misc_feature (559)..(559): n is a, c, g, or t
  misc_feature (564)..(564): n is a, c, g, or t
  misc_feature (571)..(571): n is a, c, g, or t
  misc_feature (587)..(587): n is a, c, g, or t
  misc_feature (590)..(592): n is a, c, g, or t
  misc_feature (618)..(618): n is a, c, g, or t
  misc_feature (629)..(631): n is a, c, g, or t
  misc_feature (641)..(641): n is a, c, g, or t
  misc_feature (644)..(644): n is a, c, g, or t
  misc_feature (647)..(648): n is a, c, g, or t
  misc_feature (652)..(652): n is a, c, g, or t
  misc_feature (655)..(655): n is a, c, g, or t
  misc_feature (666)..(667): n is a, c, g, or t
  misc_feature (672)..(673): n is a, c, g, or t
  misc_feature (678)..(678): n is a, c, g, or t
  misc_feature (683)..(683): n is a, c, g, or t
  misc_feature (687)..(690): n is a, c, g, or t
  misc_feature (694)..(694): n is a, c, g, or t
  misc_feature (701)..(702): n is a, c, g, or t
  misc_feature (704)..(704): n is a, c, g, or t
  misc_feature (706)..(707): n is a, c, g, or t
  misc_feature (720)..(720): n is a, c, g, or t
  misc_feature (740)..(740): n is a, c, g, or t
  misc_feature (743)..(743): n is a, c, g, or t
  misc_feature (746)..(746): n is a, c, g, or t
  misc_feature (759)..(760): n is a, c, g, or t
  misc_feature (769)..(769): n is a, c, g, or t
  misc_feature (780)..(780): n is a, c, g, or t
  misc_feature (783)..(783): n is a, c, g, or t
  misc_feature (798)..(798): n is a, c, g, or t
  misc_feature (848)..(848): n is a, c, g, or t
  misc_feature (851)..(852): n is a, c, g, or t
  misc_feature (857)..(857): n is a, c, g, or t
  misc_feature (861)..(863): n is a, c, g, or t
  misc_feature (866)..(867): n is a, c, g, or t
agnaacgcggncggnggnnctcncccngcggagcnggnccncccccnngnncccagaanagnagcgctcggngannncccacgngnagacnnnggctgccccncgngnccanggcnttnnnccnnccccccgnatccggnncncccccccctccctnggggngcgggggtcccngngccgnggngataccnggcganncnttgtgcccccgcnnggggggnaggacccccggcaccggcccngacccanancagnngcttngtggggggcccccccgccanagaacgaattncgccnccggccgcggccatcggaacncncctagcagngcgtcntgctaggcnggnnnacgggnatccgcaancccncccttngtaccgggacagccgngggnccgtatgggctgngcgntnggccgtagccanntncctttngaaangacncggnagctnttcatccgcctcacaaaccncngggncngngggggctntntcntgngccgcccgccgcgtgngcgcanaaaaaaaaaaaanncggccntccncccctcttttggccngggtnccccgcncaccccgtgccgagtnccnnnccccccacaacctcacaccgatcccngtgggttcccnnngggagtcgcncgngcnnagcnggnttctccccatnncgcgnngcttnagcgngccnnnncacngtttgtnngngnntgcctccccttcntccttgaggcaaaagcccgnacngtntctgtggaccacnntgctgaggngctgggcgccncgntctctctctctctcnctctctctctctctctatctctctttctctctctggggcccctcccttgntgnngccanaagnnngcnnacccgtaaagtaagt

SEQ ID NO: 121 - DNA, 975 bp, Artificial Sequence
  Description of Artificial Sequence: Note = Synthetic Construct
  misc_feature (6)..(6): n is a, c, g, or t
  misc_feature (8)..(8): n is a, c, g, or t
  misc_feature (15)..(15): n is a, c, g, or t
  misc_feature (33)..(33): n is a, c, g, or t
  misc_feature (39)..(39): n is a, c, g, or t
  misc_feature (41)..(41): n is a, c, g, or t
  misc_feature (43)..(43): n is a, c, g, or t
  misc_feature (45)..(45): n is a, c, g, or t
  misc_feature (52)..(52): n is a, c, g, or t
  misc_feature (68)..(68): n is a, c, g, or t
  misc_feature (76)..(76): n is a, c, g, or t
  misc_feature (81)..(81): n is a, c, g, or t
  misc_feature (91)..(91): n is a, c, g, or t
  misc_feature (106)..(106): n is a, c, g, or t
  misc_feature (108)..(108): n is a, c, g, or t
  misc_feature (122)..(122): n is a, c, g, or t
  misc_feature (129)..(129): n is a, c, g, or t
  misc_feature (131)..(131): n is a, c, g, or t
  misc_feature (170)..(171): n is a, c, g, or t
  misc_feature (182)..(182): n is a, c, g, or t
  misc_feature (186)..(187): n is a, c, g, or t
  misc_feature (194)..(195): n is a, c, g, or t
  misc_feature (212)..(212): n is a, c, g, or t
  misc_feature (217)..(217): n is a, c, g, or t
  misc_feature (225)..(225): n is a, c, g, or t
  misc_feature (240)..(240): n is a, c, g, or t
  misc_feature (258)..(259): n is a, c, g, or t
  misc_feature (264)..(264): n is a, c, g, or t
  misc_feature (269)..(269): n is a, c, g, or t
  misc_feature (275)..(275): n is a, c, g, or t
  misc_feature (288)..(288): n is a, c, g, or t
  misc_feature (296)..(296): n is a, c, g, or t
  misc_feature (303)..(303): n is a, c, g, or t
  misc_feature (308)..(308): n is a, c, g, or t
  misc_feature (311)..(311): n is a, c, g, or t
  misc_feature (322)..(322): n is a, c, g, or t
  misc_feature (327)..(327): n is a, c, g, or t
  misc_feature (336)..(336): n is a, c, g, or t
  misc_feature (351)..(351): n is a, c, g, or t
  misc_feature (374)..(374): n is a, c, g, or t
  misc_feature (387)..(387): n is a, c, g, or t
  misc_feature (421)..(421): n is a, c, g, or t
  misc_feature (435)..(435): n is a, c, g, or t
  misc_feature (456)..(456): n is a, c, g, or t
  misc_feature (504)..(504): n is a, c, g, or t
  misc_feature (507)..(507): n is a, c, g, or t
  misc_feature (509)..(509): n is a, c, g, or t
  misc_feature (639)..(639): n is a, c, g, or t
  misc_feature (940)..(940): n is a, c, g, or t
  misc_feature (973)..(973): n is a, c, g, or t
aatttngncaataanggcccttcccctgagtgnggggancncncntgttcanaaggtacgtttagcgnggttctcnagttnatggtaaccnagtacttaattggcncncttgataaatgctngatcctnanaatttcaacaaccgcaggaccatttttgaacttggcggnngtttacccttnatgnnctttccnnaaaatggcttcctttgncatcnaatagtgntgcccctaacccctnggttccggaggatgcatnngtggntgtgngtttgnccttgagcatgcngttccgtnacgggancaagnttntcaatgttccntcacnccatacttnggcttggggtacaanttgtatatcttcgggattatatnagtttatgtctgnttttcataaaatcacttgtggatttggctttaangttaggacaacttnccacagtttcttggatctccntcaacatgttaacgccattttgttcttgtatactaaagtgacatgtcnttntngacactaacaatcacaaattaggagtaccaatcaactttgagaaaatttaaaagatgccccatctcttgtatcagcaagtattcagccaggatttaattctttatgtaaaaattagcaagcatttctatntcattcacgtgcaaattttctttgattgttaattaagattgaagtgatatgtatggcccaaataagtctcactttaaaaaatatttctttatgaattattatccatgaatgtttgatctgtatagctattttatataagtatatgcaaggattgctaaaacaatttttgagtgaaaaaagatcctaggtagaaaatgtttaagactacctataccgtcattaaaaactcctcaccagcatttactatggttggactttcagagatctcaatcaactctttcccacccagtctactgaaagnttccacctgtagcggcccaagcaaactgagatntt

SEQ ID NO: 122 - DNA, 850 bp, Artificial Sequence
  Description of Artificial Sequence: Note = Synthetic Construct
  misc_feature (16)..(16): n is a, c, g, or t
  misc_feature (22)..(23): n is a, c, g, or t
  misc_feature (27)..(27): n is a, c, g, or t
  misc_feature (31)..(31): n is a, c, g, or t
  misc_feature (37)..(37): n is a, c, g, or t
  misc_feature (40)..(40): n is a, c, g, or t
  misc_feature (57)..(57): n is a, c, g, or t
  misc_feature (61)..(61): n is a, c, g, or t
  misc_feature (65)..(65): n is a, c, g, or t
  misc_feature (73)..(73): n is a, c, g, or t
  misc_feature (81)..(81): n is a, c, g, or t
  misc_feature (87)..(87): n is a, c, g, or t
  misc_feature (92)..(92): n is a, c, g, or t
  misc_feature (97)..(97): n is a, c, g, or t
  misc_feature (115)..(115): n is a, c, g, or t
  misc_feature (154)..(154): n is a, c, g, or t
  misc_feature (157)..(157): n is a, c, g, or t
  misc_feature (169)..(169): n is a, c, g, or t
  misc_feature (175)..(175): n is a, c, g, or t
  misc_feature (183)..(183): n is a, c, g, or t
  misc_feature (196)..(196): n is a, c, g, or t
  misc_feature (216)..(216): n is a, c, g, or t
  misc_feature (256)..(256): n is a, c, g, or t
  misc_feature (265)..(265): n is a, c, g, or t
  misc_feature (267)..(267): n is a, c, g, or t
  misc_feature (275)..(275): n is a, c, g, or t
  misc_feature (295)..(295): n is a, c, g, or t
  misc_feature (304)..(304): n is a, c, g, or t
  misc_feature (314)..(314): n is a, c, g, or t
  misc_feature (363)..(363): n is a, c, g, or t
  misc_feature (398)..(398): n is a, c, g, or t
  misc_feature (438)..(438): n is a, c, g, or t
  misc_feature (486)..(486): n is a, c, g, or t
  misc_feature (515)..(515): n is a, c, g, or t
  misc_feature (518)..(518): n is a, c, g, or t
  misc_feature (525)..(525): n is a, c, g, or t
  misc_feature (546)..(546): n is a, c, g, or t
  misc_feature (558)..(558): n is a, c, g, or t
  misc_feature (566)..(566): n is a, c, g, or t
  misc_feature (596)..(596): n is a, c, g, or t
  misc_feature (599)..(599): n is a, c, g, or t
  misc_feature (644)..(644): n is a, c, g, or t
  misc_feature (655)..(655): n is a, c, g, or t
  misc_feature (681)..(681): n is a, c, g, or t
  misc_feature (694)..(694): n is a, c, g, or t
  misc_feature (726)..(726): n is a, c, g, or t
ggggaaacccacggtnaagggnngganaacnaggtanctntttctccgggttccaanaatngaangccttccngagggccngaaaancattncttcnggagccgttcaagccagnaggtgggtttcaaacaatgcttaagttgtggggagaacnagncagtccgttccngacccngtttatcntaaaggagacggnggttaaaggttagggggttngacagtcctgctggtgttcaaggaggaggagacaagttgncatccaggngngcaggaanacctgttaaattcctgaccnaccggatgnttggagagcnaaggcggattcttccggcagtggccagatttcaacccaggtcccgcccngcttttcttggttaggcaagcaggccttagtccgngaggacgccccttggtggccagggtatcacggcccccctngggtttccatttgcagtttgtattggaccatggatcactgcttccttntgccggaagttccagattccaaactgtgngantcccatntgcaactcccatgtttgccgntgggactttttntaatatcntggtacccgcttcccatttccccacccccntgntcccttcgggaggaatcaccgcccagtgtgtcacttcctgtaggnacttccaaggntagatgagtgagtggcaggcctcacnttggcccagttantcagtgcccacagagtagcttttttgagacgntagtaaggtcttaggggaaggaatgtagtcgatccttctccttggtggccctcagcactgtgagtagaccccacacatcagggctgtgtcgttaggatctctgggagggttgaaagtttcgagg

SEQ ID NO: 123 - DNA, 889 bp, Artificial Sequence
  Description of Artificial Sequence: Note = Synthetic Construct
  misc_feature (22)..(22): n is a, c, g, or t
  misc_feature (29)..(29): n is a, c, g, or t
  misc_feature (53)..(53): n is a, c, g, or t
  misc_feature (55)..(57): n is a, c, g, or t
  misc_feature (91)..(91): n is a, c, g, or t
  misc_feature (98)..(98): n is a, c, g, or t
  misc_feature (100)..(100): n is a, c, g, or t
  misc_feature (112)..(112): n is a, c, g, or t
  misc_feature (117)..(117): n is a, c, g, or t
  misc_feature (121)..(121): n is a, c, g, or t
  misc_feature (131)..(131): n is a, c, g, or t
  misc_feature (146)..(146): n is a, c, g, or t
  misc_feature (150)..(151): n is a, c, g, or t
  misc_feature (167)..(167): n is a, c, g, or t
  misc_feature (190)..(190): n is a, c, g, or t
  misc_feature (213)..(213): n is a, c, g, or t
  misc_feature (217)..(217): n is a, c, g, or t
  misc_feature (228)..(228): n is a, c, g, or t
  misc_feature (266)..(266): n is a, c, g, or t
  misc_feature (268)..(268): n is a, c, g, or t
  misc_feature (274)..(274): n is a, c, g, or t
  misc_feature (289)..(289): n is a, c, g, or t
  misc_feature (294)..(294): n is a, c, g, or t
  misc_feature (305)..(305): n is a, c, g, or t
  misc_feature (322)..(322): n is a, c, g, or t
  misc_feature (326)..(326): n is a, c, g, or t
  misc_feature (342)..(342): n is a, c, g, or t
  misc_feature (373)..(373): n is a, c, g, or t
  misc_feature (387)..(387): n is a, c, g, or t
  misc_feature (397)..(397): n is a, c, g, or t
  misc_feature (449)..(449): n is a, c, g, or t
  misc_feature (452)..(452): n is a, c, g, or t
  misc_feature (457)..(457): n is a, c, g, or t
  misc_feature (461)..(461): n is a, c, g, or t
  misc_feature (471)..(471): n is a, c, g, or t
  misc_feature (482)..(482): n is a, c, g, or t
  misc_feature (491)..(491): n is a, c, g, or t
  misc_feature (500)..(500): n is a, c, g, or t
  misc_feature (511)..(511): n is a, c, g, or t
  misc_feature (516)..(516): n is a, c, g, or t
  misc_feature (549)..(549): n is a, c, g, or t
  misc_feature (554)..(554): n is a, c, g, or t
  misc_feature (556)..(556): n is a, c, g, or t
  misc_feature (567)..(567): n is a, c, g, or t
  misc_feature (570)..(570): n is a, c, g, or t
  misc_feature (572)..(572): n is a, c, g, or t
  misc_feature (658)..(658): n is a, c, g, or t
ggggtttccaaaaatttggggntttgganaaaccttcggggaataaaacaacngnnnaaaattaaggggggccgggggaaaaaggagattnattaaancnccacccgaattnaaacncccnccgggaccgnaaccgtttttggccnaaanncgagaagtgccttccnggcaaagtaggggaccaaaggtngggggagagaattggggtttgtncagngttccggttcnacggaaggagccggttgttgggattgtttccaaggagngngtttgngaccggagcacctcnggggngaccatggggnttgcctgttagagaccngcgngatgttttgggttcgnattcggggagggatttcgggggcctcagacnggggaggagtcccntgcgttcccnatgggaccggttgtcgggcgggtgcagtttcgctgctgtcctttggcaatgngcntgggnattngtgggcagangagattccccngcccccgcnatttccccngttccagttcntaggnaccagaggttttccgcagtgtgattcagggagntagantntagcgtctgtnttntntgcgttttccccttcatgattctcagttattttttaggagaaaaggtgcgtggaaacagagcgtccctgttccgtgctgtttctcntagcccaaaatacagatttaattctgaagccatcgacccccatatccacttcccgccctctcataaacgtgtaatatggcttgctttttccttgtaacgtttcatccaaccatagtggtagcggccacctggcatcttgaggtgggttgcgaatgagtgaatgaatgagtgagtgaatgaatgaatgaatgaatgaatgaagcaagcttcagggagattttcagagaagtg

SEQ ID NO: 124 - DNA, 929 bp, Artificial Sequence
  Description of Artificial Sequence: Note = Synthetic Construct
  misc_feature (8)..(8): n is a, c, g, or t
  misc_feature (10)..(10): n is a, c, g, or t
  misc_feature (16)..(17): n is a, c, g, or t
  misc_feature (26)..(26): n is a, c, g, or t
  misc_feature (31)..(31): n is a, c, g, or t
  misc_feature (40)..(40): n is a, c, g, or t
  misc_feature (42)..(42): n is a, c, g, or t
  misc_feature (44)..(45): n is a, c, g, or t
  misc_feature (47)..(47): n is a, c, g, or t
  misc_feature (70)..(70): n is a, c, g, or t
  misc_feature (73)..(73): n is a, c, g, or t
  misc_feature (88)..(88): n is a, c, g, or t
  misc_feature (101)..(101): n is a, c, g, or t
  misc_feature (120)..(120): n is a, c, g, or t
  misc_feature (137)..(137): n is a, c, g, or t
  misc_feature (141)..(141): n is a, c, g, or t
  misc_feature (145)..(145): n is a, c, g, or t
  misc_feature (151)..(151): n is a, c, g, or t
  misc_feature (153)..(153): n is a, c, g, or t
  misc_feature (156)..(156): n is a, c, g, or t
  misc_feature (160)..(160): n is a, c, g, or t
  misc_feature (177)..(177): n is a, c, g, or t
  misc_feature (181)..(181): n is a, c, g, or t
  misc_feature (206)..(206): n is a, c, g, or t
  misc_feature (219)..(219): n is a, c, g, or t
  misc_feature (223)..(223): n is a, c, g, or t
  misc_feature (225)..(225): n is a, c, g, or t
  misc_feature (228)..(229): n is a, c, g, or t
  misc_feature (235)..(235): n is a, c, g, or t
  misc_feature (266)..(266): n is a, c, g, or t
  misc_feature (285)..(285): n is a, c, g, or t
  misc_feature (309)..(309): n is a, c, g, or t
  misc_feature (312)..(312): n is a, c, g, or t
  misc_feature (319)..(319): n is a, c, g, or t
  misc_feature (326)..(326): n is a, c, g, or t
  misc_feature (335)..(335): n is a, c, g, or t
  misc_feature (347)..(347): n is a, c, g, or t
  misc_feature (357)..(357): n is a, c, g, or t
  misc_feature (372)..(372): n is a, c, g, or t
  misc_feature (422)..(422): n is a, c, g, or t
  misc_feature (616)..(616): n is a, c, g, or t
aatgcccntnaggggnntttccccgnatttnaaaatgggntncnngnttccaaagtttcctaaaaatttncantttccgtttttaccnggtttatggtttncagcctactcctgttcganttccaaatcggtttaantggncccnccgaancnttntttntttggcagaaggtgaanttcnttggggcccttgtttaagggttttnagccttaaattgnttgntnagnntctccntaattagttcattcctttgaccatcttttgnccctccatcttgtaaacanttaagtctattgcattccactttnctntcagttnccgtttnaccctcctnagcagaacccgnttctcagctntggatggttccaaanggtttcccaacctatgctcaataccacaggcagcttgcaggagggagaantggtatgtatttaacagcattttgacccaaacttttaggagcagagaggactttacccaggacaggaaggcaaaagacttgaatcttaaacaaaggattaagaacaggatgtcatctgtgagcctgtcacagtgggtttgcagagcaggagaacacagacaggattagctataaagttgttacattagttattntattggagcatacaatacttaaatagttctagggcaagagaaatgaacagaaatgaccttataagagccagagctgtagccacagctttctttgtgcttagtttgctagttcactctttccagggcagtctggtggattacaccaaattgcttagaaaatgctagctctactgtccctgtctattgtcagctttgcaatgtgcatagtgacaggagttgcctgggaagcttggggcttatgttttgcagatccattgtaattaaaaaagaattgtaaggagatggaggcacggggtgagggtgagggtgagtg

SEQ ID NO: 125 - DNA, 943 bp, Artificial Sequence
  Description of Artificial Sequence: Note = Synthetic Construct
  misc_feature (23)..(23): n is a, c, g, or t
  misc_feature (25)..(25): n is a, c, g, or t
  misc_feature (28)..(28): n is a, c, g, or t
  misc_feature (31)..(31): n is a, c, g, or t
  misc_feature (54)..(54): n is a, c, g, or t
  misc_feature (83)..(83): n is a, c, g, or t
  misc_feature (93)..(93): n is a, c, g, or t
  misc_feature (103)..(105): n is a, c, g, or t
  misc_feature (114)..(115): n is a, c, g, or t
  misc_feature (121)..(121): n is a, c, g, or t
  misc_feature (135)..(135): n is a, c, g, or t
  misc_feature (137)..(137): n is a, c, g, or t
  misc_feature (141)..(141): n is a, c, g, or t
  misc_feature (154)..(155): n is a, c, g, or t
  misc_feature (159)..(159): n is a, c, g, or t
  misc_feature (161)..(161): n is a, c, g, or t
  misc_feature (166)..(166): n is a, c, g, or t
  misc_feature (170)..(170): n is a, c, g, or t
  misc_feature (176)..(176): n is a, c, g, or t
  misc_feature (211)..(211): n is a, c, g, or t
  misc_feature (229)..(229): n is a, c, g, or t
  misc_feature (233)..(233): n is a, c, g, or t
  misc_feature (250)..(250): n is a, c, g, or t
  misc_feature (273)..(273): n is a, c, g, or t
  misc_feature (292)..(292): n is a, c, g, or t
  misc_feature (294)..(294): n is a, c, g, or t
  misc_feature (303)..(303): n is a, c, g, or t
  misc_feature (317)..(317): n is a, c, g, or t
  misc_feature (327)..(327): n is a, c, g, or t
  misc_feature (331)..(331): n is a, c, g, or t
  misc_feature (335)..(335): n is a, c, g, or t
  misc_feature (349)..(349): n is a, c, g, or t
  misc_feature (371)..(371): n is a, c, g, or t
  misc_feature (399)..(399): n is a, c, g, or t
  misc_feature (401)..(401): n is a, c, g, or t
  misc_feature (416)..(416): n is a, c, g, or t
  misc_feature (418)..(418): n is a, c, g, or t
  misc_feature (458)..(458): n is a, c, g, or t
  misc_feature (479)..(479): n is a, c, g, or t
  misc_feature (588)..(588): n is a, c, g, or t
  misc_feature (604)..(604): n is a, c, g, or t
  misc_feature (644)..(644): n is a, c, g, or t
  misc_feature (648)..(648): n is a, c, g, or t
  misc_feature (654)..(654): n is a, c, g, or t
  misc_feature (702)..(702): n is a, c, g, or t
  misc_feature (710)..(710): n is a, c, g, or t
  misc_feature (724)..(724): n is a, c, g, or t
  misc_feature (893)..(893): n is a, c, g, or t
  misc_feature (896)..(896): n is a, c, g, or t
  misc_feature (919)..(919): n is a, c, g, or t
  misc_feature (940)..(940): n is a, c, g, or t
ttggaaaccccaacctggaaaangngtnttnccgggaaattcaacctgcgggcnaatggtgtaaaagggcctaccttggcttngaagggaatntcctgaaggnnnaatcccaannttgtgnatcccaattaaggntnaacnggtttaatttgtnntccncntaccnaccnggtttnccgttatactaaagggctaacaattaaatgctcanaagggacccccaatcctnggcnagaacttgggttaaggnttccattaggatttgccatcctntaccgtgatcctgaacatntnttgaactgntttgccaaggaacngaaggttttncctnaagntagcacacagcagngaccaaggattggaacccagcnagtgcttggaggtaaaagatcacttccntntcccttagtcaggancnttagggagtggaggcatcacccacacattccccagtttgnacgtaggtttcagccagcaanccgtccactaaagctgcctccaattcaaactggattgagtgacaagtggcttgggtgtctctcaaagatttataggtggcaatggccactcctctgtgtaattaccctntatgcacgtctttttnttctctcccactccatcccccacccctctttgtttcttcntccnttcctntccctcctgttgactttttctctccctgcaaacagttccaggcaccgnttagcatntgccactctggctntagaaagctttgcttcccctctgctccctggctggctggaactcagcctccggtgtgggcagactggctcatcctctgtgtttctctgagtgtggactgctgccttccacacagactctctgaagtcaaggagccgcaccagcacttcagttgtgggccataatcaagncangactgaaagttgccacctgtagnggccgcaagcaaactgagatnttg

SEQ ID NO: 126 - DNA, 867 bp, Artificial Sequence
  Description of Artificial Sequence: Note = Synthetic Construct
  misc_feature (9)..(9): n is a, c, g, or t
  misc_feature (40)..(41): n is a, c, g, or t
  misc_feature (45)..(45): n is a, c, g, or t
  misc_feature (60)..(60): n is a, c, g, or t
  misc_feature (70)..(70): n is a, c, g, or t
  misc_feature (85)..(85): n is a, c, g, or t
  misc_feature (108)..(108): n is a, c, g, or t
  misc_feature (127)..(127): n is a, c, g, or t
  misc_feature (129)..(129): n is a, c, g, or t
  misc_feature (131)..(131): n is a, c, g, or t
  misc_feature (141)..(141): n is a, c, g, or t
  misc_feature (152)..(152): n is a, c, g, or t
  misc_feature (155)..(155): n is a, c, g, or t
  misc_feature (180)..(180): n is a, c, g, or t
  misc_feature (197)..(197): n is a, c, g, or t
  misc_feature (260)..(260): n is a, c, g, or t
  misc_feature (285)..(285): n is a, c, g, or t
  misc_feature (293)..(293): n is a, c, g, or t
  misc_feature (306)..(306): n is a, c, g, or t
  misc_feature (333)..(333): n is a, c, g, or t
  misc_feature (350)..(350): n is a, c, g, or t
  misc_feature (371)..(371): n is a, c, g, or t
  misc_feature (373)..(373): n is a, c, g, or t
  misc_feature (409)..(409): n is a, c, g, or t
  misc_feature (433)..(433): n is a, c, g, or t
  misc_feature (532)..(532): n is a, c, g, or t
  misc_feature (562)..(562): n is a, c, g, or t
  misc_feature (660)..(660): n is a, c, g, or t
aggaaaccnttttaaaaaaaaggggggggggggggggggnntagnggcaaaaaagatganaccctcaagncggggggggttaaanaaggaatcggattcgggctttgnacaaataaaggagttttgngngnattttccccntggtcgttttntgnacgatccacggttgaccgacgacgnacggaccgacaaccaanacgtaaaggggaattgtggaggggttggaagtttagatgccccgacccaggacgtgcggccancttccggagacccacctttcttgtnggccgggnccggcggcagcgnagccatttccaccggatccctatagcnggccagcctagcaggcngaacaccagcgggaagttgantnggacctcggagagcgcccgcccttccggcggaagtnctaattccaaagcggcccgcggcngagtttcccatacaggttggttccgtctcggagtgacgtggcttgaaggacggtcttcgcgcgagaagagtaccctgcctttcaggtgcgggagttacntcagcctgctgcacacccggctgtgcgcantcttctggtgtggccgggacggttcacccagaggagtctctgtagttcggagcaagatgtcggttaaatctggcaggaaaatgccttctatgctcatntatatattcctgcttccctcagcttgctttcgacttagtaaggtaacatttcagagcggtgcacttagtactttttggcactgtgctgtataaatataaatgttccacacttaacatcttagatgttatatctaaagatatgcatctttaaacttcgaaagcgcataccctaaaatttcatatttttgcatacattggtcagctgtg

SEQ ID NO: 127 - DNA, 303 bp, Artificial Sequence
  Description of Artificial Sequence: Note = Synthetic Construct
ggaaatgattagtccaagaaatatttgagcagaagggagttagggttttcaaattaggaaagtggaatccacagagttcccttgacagagaatataaaaaggactctggggtgtcagaatggtgggcattaacctgatcttccacttgagggtaagggaaatgattagtccaagaaatatttgagcagaagggagttagggttttcaaattaggaaagtggaatccacagagttcccttgacagagaatataaaaaggactctggggtgtcagaatggtgggcattaacctgatcttccactt

SEQ ID NO: 128 - DNA, 840 bp, Artificial Sequence
  Description of Artificial Sequence: Note = Synthetic Construct
  misc_feature (8)..(9): n is a, c, g, or t
  misc_feature (13)..(13): n is a, c, g, or t
  misc_feature (20)..(20): n is a, c, g, or t
  misc_feature (25)..(26): n is a, c, g, or t
  misc_feature (29)..(29): n is a, c, g, or t
  misc_feature (33)..(35): n is a, c, g, or t
  misc_feature (45)..(46): n is a, c, g, or t
  misc_feature (62)..(62): n is a, c, g, or t
  misc_feature (74)..(74): n is a, c, g, or t
  misc_feature (80)..(80): n is a, c, g, or t
  misc_feature (89)..(89): n is a, c, g, or t
  misc_feature (91)..(91): n is a, c, g, or t
  misc_feature (94)..(94): n is a, c, g, or t
  misc_feature (98)..(98): n is a, c, g, or t
  misc_feature (103)..(103): n is a, c, g, or t
  misc_feature (106)..(106): n is a, c, g, or t
  misc_feature (113)..(113): n is a, c, g, or t
  misc_feature (117)..(117): n is a, c, g, or t
  misc_feature (119)..(119): n is a, c, g, or t
  misc_feature (122)..(122): n is a, c, g, or t
  misc_feature (127)..(127): n is a, c, g, or t
  misc_feature (131)..(131): n is a, c, g, or t
  misc_feature (135)..(135): n is a, c, g, or t
  misc_feature (138)..(138): n is a, c, g, or t
  misc_feature (141)..(141): n is a, c, g, or t
  misc_feature (153)..(154): n is a, c, g, or t
  misc_feature (162)..(162): n is a, c, g, or t
  misc_feature (164)..(164): n is a, c, g, or t
  misc_feature (167)..(167): n is a, c, g, or t
  misc_feature (170)..(171): n is a, c, g, or t
  misc_feature (176)..(177): n is a, c, g, or t
  misc_feature (181)..(181): n is a, c, g, or t
  misc_feature (192)..(192): n is a, c, g, or t
  misc_feature (207)..(207): n is a, c, g, or t
  misc_feature (214)..(214): n is a, c, g, or t
  misc_feature (220)..(221): n is a, c, g, or t
  misc_feature (230)..(230): n is a, c, g, or t
  misc_feature (232)..(232): n is a, c, g, or t
  misc_feature (242)..(242): n is a, c, g, or t
  misc_feature (250)..(250): n is a, c, g, or t
  misc_feature (275)..(275): n is a, c, g, or t
  misc_feature (280)..(280): n is a, c, g, or t
  misc_feature (287)..(287): n is a, c, g, or t
  misc_feature (307)..(307): n is a, c, g, or t
  misc_feature (315)..(317): n is a, c, g, or t
  misc_feature (320)..(320): n is a, c, g, or t
  misc_feature (330)..(330): n is a, c, g, or t
  misc_feature (350)..(350): n is a, c, g, or t
  misc_feature (352)..(352): n is a, c, g, or t
  misc_feature (360)..(360): n is a, c, g, or t
  misc_feature (411)..(411): n is a, c, g, or t
  misc_feature (442)..(442): n is a, c, g, or t
  misc_feature (449)..(449): n is a, c, g, or t
  misc_feature (466)..(466): n is a, c, g, or t
  misc_feature (475)..(475): n is a, c, g, or t
  misc_feature (486)..(486): n is a, c, g, or t
  misc_feature (499)..(499): n is a, c, g, or t
  misc_feature (521)..(521): n is a, c, g, or t
  misc_feature (524)..(524): n is a, c, g, or t
  misc_feature (529)..(529): n is a, c, g, or t
  misc_feature (534)..(534): n is a, c, g, or t
  misc_feature (536)..(537): n is a, c, g, or t
  misc_feature (548)..(548): n is a, c, g, or t
  misc_feature (554)..(554): n is a, c, g, or t
  misc_feature (563)..(563): n is a, c, g, or t
  misc_feature (613)..(613): n is a, c, g, or t
  misc_feature (645)..(645): n is a, c, g, or t
  misc_feature (648)..(648): n is a, c, g, or t
  misc_feature (654)..(654): n is a, c, g, or t
  misc_feature (658)..(658): n is a, c, g, or t
  misc_feature (678)..(678): n is a, c, g, or t
  misc_feature (684)..(684): n is a, c, g, or t
  misc_feature (691)..(691): n is a, c, g, or t
  misc_feature (740)..(740): n is a, c, g, or t
  misc_feature (743)..(743): n is a, c, g, or t
  misc_feature (776)..(776): n is a, c, g, or t
  misc_feature (802)..(802): n is a, c, g, or t
aaaccggnngaanaaaaaangaaannganggcnnnaaaaaagttnngacagaaaaaactttnggaaaaaaggangggganaaggcaggngnccnactnaaaanggncttttcnaagngnganagagntggnaatnagnaanaggacattcttnnaacctccnanggnggnnggaannaatngggattgagcngccaccattagggangaagttngaattnnggggcccgngngagttaaaangattcccnggttttttaaaacagagaatacctncaggnacagatnaacccgagattggttccctngaaaattnnnganaaagataaangtaggagcattcaaagtagnanggtaaaantaatgggagacatagacaccaaaaaaagccagttcagtgggccccgaaggngcattaagggaggaccaggaaacggcagcanagccacnggcagccgcctgccccnacaccagtnattcccgcacntagatccaggcgntgggggcggggcggggcgcgcntgngcagngaagntnngcggcaacaantttgcntagaccggntggaaccggttagaaccggccgcgccggaccggccgcccgttccggattntgcgttcacaaagggaggcgggactcacgacntgngtatcnttgnggtcccaaccccggcccccnaccccnacccccnttgtccctgtggcattcgcgttctttccgccgtctccctcgcgggccgnttntctgcgcctggtgatcctttcgccatggtcctntggagaaagaaaaaatctttaatttnctagggacgtccttttcctgtagtcgtaattgtagaaa

SEQ ID NO: 129 - DNA, 893 bp, Artificial Sequence
  Description of Artificial Sequence: Note = Synthetic Construct
  misc_feature (9)..(10): n is a, c, g, or t
  misc_feature (14)..(14): n is a, c, g, or t
  misc_feature (19)..(19): n is a, c, g, or t
  misc_feature (23)..(23): n is a, c, g, or t
  misc_feature (29)..(29): n is a, c, g, or t
  misc_feature (45)..(45): n is a, c, g, or t
  misc_feature (57)..(57): n is a, c, g, or t
  misc_feature (65)..(66): n is a, c, g, or t
  misc_feature (80)..(80): n is a, c, g, or t
  misc_feature (91)..(91): n is a, c, g, or t
  misc_feature (98)..(98): n is a, c, g, or t
  misc_feature (103)..(103): n is a, c, g, or t
  misc_feature (109)..(109): n is a, c, g, or t
  misc_feature (122)..(122): n is a, c, g, or t
  misc_feature (125)..(125): n is a, c, g, or t
  misc_feature (146)..(146): n is a, c, g, or t
  misc_feature (150)..(150): n is a, c, g, or t
  misc_feature (165)..(165): n is a, c, g, or t
  misc_feature (168)..(168): n is a, c, g, or t
  misc_feature (213)..(213): n is a, c, g, or t
  misc_feature (225)..(225): n is a, c, g, or t
  misc_feature (257)..(257): n is a, c, g, or t
  misc_feature (261)..(261): n is a, c, g, or t
  misc_feature (289)..(289): n is a, c, g, or t
  misc_feature (292)..(292): n is a, c, g, or t
  misc_feature (296)..(296): n is a, c, g, or t
  misc_feature (298)..(298): n is a, c, g, or t
  misc_feature (309)..(309): n is a, c, g, or t
  misc_feature (324)..(324): n is a, c, g, or t
  misc_feature (327)..(327): n is a, c, g, or t
  misc_feature (338)..(338): n is a, c, g, or t
  misc_feature (345)..(345): n is a, c, g, or t
  misc_feature (355)..(355): n is a, c, g, or t
  misc_feature (372)..(372): n is a, c, g, or t
  misc_feature (388)..(388): n is a, c, g, or t
  misc_feature (432)..(432): n is a, c, g, or t
  misc_feature (461)..(461): n is a, c, g, or t
  misc_feature (474)..(474): n is a, c, g, or t
  misc_feature (509)..(509): n is a, c, g, or t
  misc_feature (520)..(520): n is a, c, g, or t
  misc_feature (546)..(546): n is a, c, g, or t
  misc_feature (551)..(551): n is a, c, g, or t
  misc_feature (563)..(563): n is a, c, g, or t
  misc_feature (582)..(582): n is a, c, g, or t
  misc_feature (594)..(594): n is a, c, g, or t
  misc_feature (609)..(609): n is a, c, g, or t
  misc_feature (611)..(611): n is a, c, g, or t
  misc_feature (613)..(613): n is a, c, g, or t
  misc_feature (627)..(627): n is a, c, g, or t
  misc_feature (633)..(633): n is a, c, g, or t
  misc_feature (635)..(635): n is a, c, g, or t
  misc_feature (649)..(649): n is a, c, g, or t
  misc_feature (674)..(674): n is a, c, g, or t
  misc_feature (687)..(687): n is a, c, g, or t
  misc_feature (699)..(699): n is a, c, g, or t
  misc_feature (701)..(701): n is a, c, g, or t
  misc_feature (707)..(707): n is a, c, g, or t
  misc_feature (718)..(718): n is a, c, g, or t
  misc_feature (735)..(735): n is a, c, g, or t
  misc_feature (738)..(738): n is a, c, g, or t
  misc_feature (745)..(745): n is a, c, g, or t
  misc_feature (757)..(757): n is a, c, g, or t
  misc_feature (781)..(781): n is a, c, g, or t
gagaaggannaggnggggngagngaaganagaggagggaagaaangaaggtggaganaagtggannaaaaagagggaganggagggagaantaaaganagganaagagnggggaggaggggnagnataggagaggaaagaaaggangganagaagagaaaagaangangagagaaaggaaagaggaaagaaagaggggagaagaggaagaaanagaggaggggangagagggaggataagagaggaaagagggaganaggnttgaaaagggaaagagaaggagaaaggnagnaggngnggaagagaggnaagggagaggggganaanggtaagggggnaaagaangagaagtatngggggaaaggaggagangaaagaagaaagagangaggaggagagggagagtgaggaataaaggggagggaaaaggangagaaagagagagagggagagggaagaanagagaaggatagnggggtggagaaggagaaaggagagaaggagaaggngagaggagaantgaagaaggagggagtaagaaaggantgagnaggaaaggaganagagaggtagagagaaaanaaagagggaaanggaggggaggagggngnanaaggaatagagggnggaaanangagagaggggaaanggggaaggaaaggaggaaaaaaagnagagaagaagagnaatgggaaggangnagtagnaaaagaaaagnagaggggagaggggganganggggganacgggggggaanagaaaaagtgaaggaggccccccnaccccccccccccacacacacacacagccttttcgccggcggaagtgcaggttggtccaggagcctgtggtcaatccagtcagtagtgggcgaggtgtaacatctgtgtccg

SEQ ID NO: 130 - DNA, 789 bp, Artificial Sequence
  Description of Artificial Sequence: Note = Synthetic Construct
  misc_feature (6)..(6): n is a, c, g, or t
  misc_feature (8)..(9): n is a, c, g, or t
  misc_feature (12)..(13): n is a, c, g, or t
  misc_feature (16)..(17): n is a, c, g, or t
  misc_feature (19)..(19): n is a, c, g, or t
  misc_feature (22)..(23): n is a, c, g, or t
  misc_feature (30)..(30): n is a, c, g, or t
  misc_feature (32)..(32): n is a, c, g, or t
  misc_feature (37)..(37): n is a, c, g, or t
  misc_feature (44)..(45): n is a, c, g, or t
  misc_feature (51)..(51): n is a, c, g, or t
  misc_feature (57)..(57): n is a, c, g, or t
  misc_feature (62)..(62): n is a, c, g, or t
  misc_feature (72)..(72): n is a, c, g, or t
  misc_feature (84)..(84): n is a, c, g, or t
  misc_feature (98)..(99): n is a, c, g, or t
  misc_feature (102)..(103): n is a, c, g, or t
  misc_feature (112)..(112): n is a, c, g, or t
  misc_feature (115)..(116): n is a, c, g, or t
  misc_feature (129)..(129): n is a, c, g, or t
  misc_feature (132)..(132): n is a, c, g, or t
  misc_feature (146)..(146): n is a, c, g, or t
  misc_feature (148)..(148): n is a, c, g, or t
  misc_feature (158)..(158): n is a, c, g, or t
  misc_feature (161)..(161): n is a, c, g, or t
  misc_feature (165)..(165): n is a, c, g, or t
  misc_feature (170)..(170): n is a, c, g, or t
  misc_feature (177)..(177): n is a, c, g, or t
  misc_feature (210)..(210): n is a, c, g, or t
  misc_feature (220)..(220): n is a, c, g, or t
  misc_feature (226)..(227): n is a, c, g, or t
  misc_feature (282)..(282): n is a, c, g, or t
  misc_feature (291)..(291): n is a, c, g, or t
  misc_feature (293)..(293): n is a, c, g, or t
  misc_feature (309)..(309): n is a, c, g, or t
  misc_feature (317)..(317): n is a, c, g, or t
  misc_feature (375)..(375): n is a, c, g, or t
  misc_feature (379)..(379): n is a, c, g, or t
  misc_feature (396)..(396): n is a, c, g, or t
  misc_feature (411)..(411): n is a, c, g, or t
  misc_feature (490)..(490): n is a, c, g, or t
  misc_feature (496)..(496): n is a, c, g, or t
  misc_feature (531)..(531): n is a, c, g, or t
  misc_feature (544)..(544): n is a, c, g, or t
  misc_feature (570)..(570): n is a, c, g, or t
  misc_feature (696)..(696): n is a, c, g, or t
taaaanannggnngannanctnnaaaaaantntcttnggaattnncagganggaggntaatngggcgggcancatcaatggtanaaatttgggggggnngannaaaatcatnaanncaaccgtttccanagncaaccattctgggngncccaaggttngangagntccgntcaaggngaaaccttttcaagaccaattaactaggggatnagaggcgggntggttnntgaggggcgggctgctgagaagattcgttgggggacccaggagtgaaggtttttnacctgtgtntntcgggaaggtcggatntattatantcctgctgttggaggagttcggtggttcaagggccggacccggagcgtttactttttnttgnccgcagccaatttgttntgcttggtttcttcngaatcccggggcggggagggggaagcggggggcccaatcaccacgatcccggcagccaccgcgaaattgttccggcagntacgantcttcaacaagagccagagaaggcgggtgcagagnttcattaggacgntcggaaacccggcgtgacttactttntccaagcccattggttgatgagaatgatgactgacagggaggcgtggtcacgctgtcgcgggcgggagcgacgggtggagttaacgacgaaagctgcgcgcgcagccatgacccctcacagccacntatcggagggaggggcgggacagctttagcttggtgcgtgcgcagccggacgtgaggcagttggtggtcttccatcgtcgatttctggttacc

SEQ ID NO: 131 - DNA, 872 bp, Artificial Sequence
  Description of Artificial Sequence: Note = Synthetic Construct
  misc_feature (6)..(6): n is a, c, g, or t
  misc_feature (16)..(16): n is a, c, g, or t
  misc_feature (26)..(26): n is a, c, g, or t
  misc_feature (29)..(29): n is a, c, g, or t
  misc_feature (34)..(36): n is a, c, g, or t
  misc_feature (43)..(43): n is a, c, g, or t
  misc_feature (74)..(74): n is a, c, g, or t
  misc_feature (83)..(83): n is a, c, g, or t
  misc_feature (90)..(90): n is a, c, g, or t
  misc_feature (95)..(95): n is a, c, g, or t
  misc_feature (104)..(104): n is a, c, g, or t
  misc_feature (125)..(125): n is a, c, g, or t
  misc_feature (134)..(134): n is a, c, g, or t
  misc_feature (167)..(167): n is a, c, g, or t
  misc_feature (174)..(174): n is a, c, g, or t
  misc_feature (176)..(176): n is a, c, g, or t
  misc_feature (186)..(186): n is a, c, g, or t
  misc_feature (189)..(189): n is a, c, g, or t
  misc_feature (193)..(193): n is a, c, g, or t
  misc_feature (272)..(272): n is a, c, g, or t
  misc_feature (279)..(279): n is a, c, g, or t
  misc_feature (306)..(306): n is a, c, g, or t
  misc_feature (350)..(350): n is a, c, g, or t
  misc_feature (356)..(356): n is a, c, g, or t
  misc_feature (360)..(360): n is a, c, g, or t
  misc_feature (386)..(386): n is a, c, g, or t
  misc_feature (424)..(424): n is a, c, g, or t
  misc_feature (444)..(444): n is a, c, g, or t
  misc_feature (452)..(452): n is a, c, g, or t
  misc_feature (469)..(469): n is a, c, g, or t
  misc_feature (471)..(471): n is a, c, g, or t
  misc_feature (483)..(483): n is a, c, g, or t
  misc_feature (502)..(502): n is a, c, g, or t
  misc_feature (509)..(509): n is a, c, g, or t
  misc_feature (518)..(518): n is a, c, g, or t
  misc_feature (559)..(559): n is a, c, g, or t
  misc_feature (588)..(588): n is a, c, g, or t
  misc_feature (594)..(594): n is a, c, g, or t
  misc_feature (614)..(614): n is a, c, g, or t
  misc_feature (619)..(619): n is a, c, g, or t
  misc_feature (621)..(621): n is a, c, g, or t
  misc_feature (641)..(641): n is a, c, g, or t
  misc_feature (656)..(656): n is a, c, g, or t
  misc_feature (666)..(666): n is a, c, g, or t
  misc_feature (687)..(687): n is a, c, g, or t
  misc_feature (717)..(717): n is a, c, g, or t
  misc_feature (720)..(720): n is a, c, g, or t
gggggnggcttttttnggaggcatanatnggggnnngtccggnaaaccccattggtcggccggggaaggaaaanggggctctnaaaatangttantgggatggngccttaagggggggcccatgngccaggaangcagattcaaaaatgttccaagtggaaaaccanggttggnanaggccctccnggncgtnaaggaggagaggagagatggagtttcaggtgtgtttcccacccagtgttcccagggaacacaaaacggataggtcaccntcaatgnacaaggaattaaaagcttgggtgtatngggaggcctgcttccaaagccaccagaaaatccggagagccggnggatcntacncacccagaggttcatagggagggcantattaggggtgtgcccttgtgagaggaagtgtggcacngtggggctgggtttgagatntcagatgntcaagccaggcccattntntctctctcagtntctctcggtctctttctcngtctctnttcagtctnttcagtctctctcagactctctctctctctctctctctctntctctctctctctctctctctctctcccngctgcnttcagatatagacgtagaantctcntntatccagcaccatgtctgcntgcatgctgccattnttcccaccangacgataataggctaaacttntgaactctaagccagcctcaattaaatttntangagtcaaaccagcctcaattaaatgttttcatttctatgagtcacagtggtcatggcatttctttacagcaatagaaaccctaactaagacttgccgaaacctcaaccacaacttcagccctcagaagcccaagagggaaaagaccttgaat

SEQ ID NO: 132 - DNA, 785 bp, Artificial Sequence
  Description of Artificial Sequence: Note = Synthetic Construct
  misc_feature (7)..(7): n is a, c, g, or t
  misc_feature (12)..(12): n is a, c, g, or t
  misc_feature (20)..(20): n is a, c, g, or t
  misc_feature (24)..(24): n is a, c, g, or t
  misc_feature (26)..(26): n is a, c, g, or t
  misc_feature (30)..(30): n is a, c, g, or t
  misc_feature (59)..(59): n is a, c, g, or t
  misc_feature (70)..(70): n is a, c, g, or t
  misc_feature (73)..(73): n is a, c, g, or t
  misc_feature (85)..(85): n is a, c, g, or t
  misc_feature (105)..(105): n is a, c, g, or t
  misc_feature (112)..(112): n is a, c, g, or t
  misc_feature (168)..(168): n is a, c, g, or t
  misc_feature (220)..(220): n is a, c, g, or t
  misc_feature (243)..(243): n is a, c, g, or t
  misc_feature (258)..(258): n is a, c, g, or t
  misc_feature (414)..(414): n is a, c, g, or t
  misc_feature (539)..(539): n is a, c, g, or t
tcgtaanttttnatccaccngtanangatnttccatgccaccatgtacggttacgaggngtatagcgtgnacngttttggagtgngctaaaaggaaatggagacntattgtnttggttttgtgacccataacttcggaaaggttgtgttttatccggcaacaaccacngtgtagcggtgttttttgtttgcagcagcagataacgcgcagaaaaaggatntcaggagatcctttgattttttnttcgggttctgacgntcatgttgtgtggaattgtgagcggataacaatttcacacagaattcaaaggagaggagccaatatagagggggaaaaaaaaagaaggggaaagcattagtttaaaaagttgagagaacaaagtatgttttgcttggatgggcaaccaaagaagcntgccaggaatggtcggtaaaaggtgtaagagtcatgaaacgtcttctgtccaaccgttaccggaaacatgcaaggaatttcttagactggccaggattggattgtgggaaaggtctcttcaagcntccccttggcttttatggcaagaaaatagtgcggactatagagagcgtcgttctcaaagcttgtccccaatagcagaaaagcattgtcctaaattccttaaaaggcaccgtgaaataaatattacgaggacacgatggcacaagaaggagctttcaactctgccaccagaacagttatacttcatagtaaccatgttgccctgttcaatgacaaggcacgctctccagcagaaagggaaaaggagc

SEQ ID NO: 133 - DNA, 889 bp, Artificial Sequence
  Description of Artificial Sequence: Note = Synthetic Construct
  misc_feature (1)..(1): n is a, c, g, or t
  misc_feature (4)..(5): n is a, c, g, or t
  misc_feature (13)..(13): n is a, c, g, or t
  misc_feature (20)..(20): n is a, c, g, or t
  misc_feature (24)..(24): n is a, c, g, or t
  misc_feature (32)..(32): n is a, c, g, or t
  misc_feature (46)..(46): n is a, c, g, or t
  misc_feature (50)..(50): n is a, c, g, or t
  misc_feature (53)..(53): n is a, c, g, or t
  misc_feature (60)..(60): n is a, c, g, or t
  misc_feature (70)..(70): n is a, c, g, or t
  misc_feature (74)..(74): n is a, c, g, or t
  misc_feature (82)..(82): n is a, c, g, or t
  misc_feature (85)..(87): n is a, c, g, or t
  misc_feature (90)..(90): n is a, c, g, or t
  misc_feature (117)..(117): n is a, c, g, or t
  misc_feature (121)..(121): n is a, c, g, or t
  misc_feature (138)..(138): n is a, c, g, or t
  misc_feature (140)..(140): n is a, c, g, or t
  misc_feature (145)..(145): n is a, c, g, or t
  misc_feature (148)..(148): n is a, c, g, or t
  misc_feature (157)..(157): n is a, c, g, or t
  misc_feature (169)..(169): n is a, c, g, or t
  misc_feature (183)..(183): n is a, c, g, or t
  misc_feature (190)..(190): n is a, c, g, or t
  misc_feature (195)..(195): n is a, c, g, or t
  misc_feature (216)..(216): n is a, c, g, or t
  misc_feature (229)..(229): n is a, c, g, or t
  misc_feature (240)..(240): n is a, c, g, or t
  misc_feature (250)..(250): n is a, c, g, or t
  misc_feature (266)..(266): n is a, c, g, or t
  misc_feature (269)..(269): n is a, c, g, or t
  misc_feature (275)..(275): n is a, c, g, or t
  misc_feature (315)..(315): n is a, c, g, or t
  misc_feature (356)..(356): n is a, c, g, or t
  misc_feature (596)..(596): n is a, c, g, or t
  misc_feature (630)..(630): n is a, c, g, or t
  misc_feature (703)..(703): n is a, c, g, or t
  misc_feature (742)..(742): n is a, c, g, or t
nttnnaaagcganccggccngggnggtttggncggcgctttatacnaagncgngccaatnggctttgggngggntttcatanggnnntgntttacccaattcagttttttattggtntttnatgggcgcagggatagngngttcnggnttcccacangaatttgatttntggaatcacaagtnaccagtngccgnaatcacgagtttgccgctttntttcctaccttanattcataatangaatgagtantttttttttattgagnaangttttnacaggtttagtaaacatgaggacagaggttttaagttgangattaggaaggagagttccgggggacagaatgtgtgtattntcagtcagtgcactacccggaagagttgcagtcaggttgaggaagggagcggatttcctggaggttttaaccaacagagagaaaaagcatttactactgattaagcacacaatctctggattcagagaagggtgtttacctttatataaaatgtctcctaactgcgtgactgtgtgactttgttgaagtcaactgagcactgactgtgttgtgtgcaacatggtaagaggaccaactttnttcttaaattttatttattatttatgtcacgtgnacacttgttgcttttgtttttgttctaattttatctgcatatatgtctgcataccacgtgcatttctgatgcntacagatgccagaaaaggacaccgagtttcccctgggantggagttatagatggttataagtctctgagtaggtactgggaagtgaacttcagtttcctctggaagggcagaaagcgcttttcaaatgctgggccatgtatttcagcccctacttaatttataattttattttagaggatgtgctc

SEQ ID NO: 134 - DNA, 947 bp, Artificial Sequence
  Description of Artificial Sequence: Note = Synthetic Construct
  misc_feature (2)..(2): n is a, c, g, or t
  misc_feature (9)..(9): n is a, c, g, or t
  misc_feature (17)..(17): n is a, c, g, or t
  misc_feature (36)..(36): n is a, c, g, or t
  misc_feature (38)..(38): n is a, c, g, or t
  misc_feature (45)..(45): n is a, c, g, or t
  misc_feature (63)..(63): n is a, c, g, or t
  misc_feature (69)..(69): n is a, c, g, or t
  misc_feature (72)..(72): n is a, c, g, or t
  misc_feature (76)..(76): n is a, c, g, or t
  misc_feature (92)..(92): n is a, c, g, or t
  misc_feature (105)..(105): n is a, c, g, or t
  misc_feature (107)..(107): n is a, c, g, or t
  misc_feature (111)..(111): n is a, c, g, or t
  misc_feature (114)..(114): n is a, c, g, or t
  misc_feature (116)..(116): n is a, c, g, or t
  misc_feature (119)..(120): n is a, c, g, or t
  misc_feature (131)..(131): n is a, c, g, or t
  misc_feature (138)..(138): n is a, c, g, or t
  misc_feature (150)..(150): n is a, c, g, or t
  misc_feature (159)..(159): n is a, c, g, or t
  misc_feature (165)..(165): n is a, c, g, or t
  misc_feature (182)..(183): n is a, c, g, or t
  misc_feature (206)..(206): n is a, c, g, or t
  misc_feature (212)..(212): n is a, c, g, or t
  misc_feature (215)..(215): n is a, c, g, or t
  misc_feature (218)..(218): n is a, c, g, or t
  misc_feature (229)..(229): n is a, c, g, or t
  misc_feature (231)..(231): n is a, c, g, or t
  misc_feature (236)..(236): n is a, c, g, or t
  misc_feature (238)..(238): n is a, c, g, or t
  misc_feature (242)..(242): n is a, c, g, or t
  misc_feature (253)..(253): n is a, c, g, or t
  misc_feature (260)..(260): n is a, c, g, or t
  misc_feature (268)..(268): n is a, c, g, or t
  misc_feature (284)..(284): n is a, c, g, or t
  misc_feature (303)..(303): n is a, c, g, or t
  misc_feature (311)..(311): n is a, c, g, or t
  misc_feature (329)..(330): n is a, c, g, or t
  misc_feature (347)..(347): n is a, c, g, or t
  misc_feature (350)..(351): n is a, c, g, or t
  misc_feature (360)..(360): n is a, c, g, or t
  misc_feature (365)..(365): n is a, c, g, or t
  misc_feature (367)..(367): n is a, c, g, or t
  misc_feature (369)..(370): n is a, c, g, or t
  misc_feature (384)..(384): n is a, c, g, or t
  misc_feature (386)..(387): n is a, c, g, or t
  misc_feature (391)..(391): n is a, c, g, or t
  misc_feature (399)..(399): n is a, c, g, or t
  misc_feature (412)..(413): n is a, c, g, or t
  misc_feature (420)..(420): n is a, c, g, or t
  misc_feature (422)..(422): n is a, c, g, or t
  misc_feature (424)..(424): n is a, c, g, or t
  misc_feature (428)..(428): n is a, c, g, or t
  misc_feature (437)..(438): n is a, c, g, or t
  misc_feature (444)..(444): n is a, c, g, or t
  misc_feature (446)..(446): n is a, c, g, or t
  misc_feature (449)..(449): n is a, c, g, or t
  misc_feature (464)..(464): n is a, c, g, or t
  misc_feature (488)..(488): n is a, c, g, or t
  misc_feature (492)..(492): n is a, c, g, or t
  misc_feature (508)..(508): n is a, c, g, or t
  misc_feature (516)..(516): n is a, c, g, or t
  misc_feature (521)..(521): n is a, c, g, or t
  misc_feature (532)..(532): n is a, c, g, or t
  misc_feature (535)..(535): n is a, c, g, or t
  misc_feature (539)..(539): n is a, c, g, or t
  misc_feature (546)..(546): n is a, c, g, or t
  misc_feature (556)..(556): n is a, c, g, or t
  misc_feature (580)..(580): n is a, c, g, or t
  misc_feature (584)..(585): n is a, c, g, or t
  misc_feature (589)..(589): n is a, c, g, or t
  misc_feature (598)..(598): n is a, c, g, or t
  misc_feature (608)..(608): n is a, c, g, or t
  misc_feature (619)..(619): n is a, c, g, or t
  misc_feature (629)..(629): n is a, c, g, or t
  misc_feature (637)..(637): n is a, c, g, or t
  misc_feature (648)..(648): n is a, c, g, or t
  misc_feature (661)..(661): n is a, c, g, or t
  misc_feature (664)..(664): n is a, c, g, or t
  misc_feature (673)..(673): n is a, c, g, or t
  misc_feature (678)..(678): n is a, c, g, or t
  misc_feature (685)..(685): n is a, c, g, or t
  misc_feature (691)..(691): n is a, c, g, or t
  misc_feature (704)..(704): n is a, c, g, or t
  misc_feature (707)..(707): n is a, c, g, or t
  misc_feature (718)..(718): n is a, c, g, or t
  misc_feature (729)..(729): n is a, c, g, or t
  misc_feature (736)..(736): n is a, c, g, or t
  misc_feature (739)..(739): n is a, c, g, or t
  misc_feature (743)..(743): n is a, c, g, or t
  misc_feature (768)..(768): n is a, c, g, or t
  misc_feature (778)..(779): n is a, c, g, or t
  misc_feature (781)..(781): n is a, c, g, or t
  misc_feature (784)..(784): n is a, c, g, or t
  misc_feature (787)..(787): n is a, c, g, or t
  misc_feature (796)..(796): n is a, c, g, or t
  misc_feature (822)..(822): n is a, c, g, or t
  misc_feature (838)..(838): n is a, c, g, or t
  misc_feature (878)..(878): n is a, c, g, or t
  misc_feature (883)..(884): n is a, c, g, or t
  misc_feature (889)..(889): n is a, c, g, or t
  misc_feature (898)..(899): n is a, c, g, or t
  misc_feature (901)..(901): n is a, c, g, or t
  misc_feature (906)..(906): n is a, c, g, or t
  misc_feature (908)..(908): n is a, c, g, or t
  misc_feature (912)..(913): n is a, c, g, or t
  misc_feature (926)..(926): n is a, c, g, or t
  misc_feature (933)..(933): n is a, c, g, or t
  misc_feature (935)..(935): n is a, c, g, or t
anaaaaatngagaagangagaccccagagaagaagnangagaganaacagagaagaagagagnaagggnganaaantagagaaaggaaaagntcttaaagaggcnanaaantancnatnnaaggagaaganggaaggntaacataggagncaagaatanaaaganaaaaagaggtagagaanncagagaacgagaaaagatgaaanaaagantanaanggaagaaagangnccagnanaaanaaggcagaaanaagatgncgtaaaanaagagagaagataggnaaaatagaggagaaggccnaacaggangggaagagcagcgaattnnagataaaaccggagganagnnagagaaggnagagntngnnaaggcaaagacagnanngagnacggtacntgccccagaaggnngaagaangncnaganggtgagggnnggcacngnccnttccccttaggaggncgcccgcccagagatcaggtttcnaggncaccgagttggatacnagattatncaccnaggcaggaaangantatngcaaaangattcggggnggggtcacggggtgagaaataaantcannaaanagaggacgnggaggagggngggaaactctngacagaaatngcaagcangaagccagccncacccaagccccnacngaagcagcngagangttgcanggcggnaggtccaaatcancgnagtcatggagngagcttcgggngggcccnganccantgaggaagggcaggaaaccatatcnagccgagccnngnganggntgccctganacacccggagaggtaatttttatttnacgggaagcgtccagncaagttcgtgggccggaagagacggtactttagtatacancgctnntgctncgagttgtnngnccttntnatgnnagatctcacaaangaagctnanaagtagatatgt

SEQ ID NO: 135 - DNA, 860 bp, Artificial Sequence
  Description of Artificial Sequence: Note = Synthetic Construct
  misc_feature (22)..(22): n is a, c, g, or t
  misc_feature (30)..(30): n is a, c, g, or t
  misc_feature (32)..(32): n is a, c, g, or t
  misc_feature (39)..(39): n is a, c, g, or t
  misc_feature (47)..(48): n is a, c, g, or t
  misc_feature (77)..(77): n is a, c, g, or t
  misc_feature (82)..(82): n is a, c, g, or t
  misc_feature (100)..(101): n is a, c, g, or t
  misc_feature (105)..(105): n is a, c, g, or t
  misc_feature (129)..(129): n is a, c, g, or t
  misc_feature (131)..(131): n is a, c, g, or t
  misc_feature (136)..(136): n is a, c, g, or t
  misc_feature (144)..(144): n is a, c, g, or t
  misc_feature (185)..(185): n is a, c, g, or t
  misc_feature (189)..(189): n is a, c, g, or t
  misc_feature (192)..(192): n is a, c, g, or t
  misc_feature (210)..(210): n is a, c, g, or t
  misc_feature (221)..(221): n is a, c, g, or t
  misc_feature (244)..(244): n is a, c, g, or t
  misc_feature (255)..(255): n is a, c, g, or t
  misc_feature (269)..(269): n is a, c, g, or t
  misc_feature (303)..(303): n is a, c, g, or t
  misc_feature (324)..(324): n is a, c, g, or t
  misc_feature (365)..(365): n is a, c, g, or t
  misc_feature (371)..(371): n is a, c, g, or t
  misc_feature (652)..(652): n is a, c, g, or t
  misc_feature (697)..(697): n is a, c, g, or t
  misc_feature (836)..(836): n is a, c, g, or t
aagggaatttttaccccggttnccttttgncnggggggnaaaaaaannaaaaaataattttttaaaattaaaggggngggangtttttccggttctattnngccnattcggggttacacttttatccancntttgnttttttanccggccgggttaaaaatggggggggattagttcgggtaggngttnccnacagcacagccctgtttntcttcgttccngaaaaaaaaaaattttgctggtntcacaattttnttaaacaggatttncttcaaccatggattaatacatttccggtgcagnttgcccggtttgttttttggntggatagggatgccagcaggattcagggatgcccattgtgnttagtntctggccctttaggagagctttgggctaattatgtgaccgattttaagaagtggtgttgttgtggttccagggactcacggatcagcctttattttataaggacactgtggaggagagacagaggctgagctgcattctgatgtcatttgtgctgctgtggaagttaaagaaaagctgcagaagtcagcaaaacagatgaataccaagaagggcagtgtgagtacaggaatggagagaaaagtcagagtccagctttggttaactccctaggatcagacanttctgcgtaaggacgggtctacagtttaacagaccacagagcaangtcaaacagcaaagtggtttcatggcaggcaggaaatggaacatttaactggaaacactgaacccacccatggcaaacttagcaatgaagctgggtgtggtggcacatgcctttaattccaacactcaggggacagatntaatgagtttgaggctagactggt

SEQ ID NO: 136 - DNA, 191 bp, Artificial Sequence
  Description of Artificial Sequence: Note = Synthetic Construct
  misc_feature (30)..(30): n is a, c, g, or t
aggtctgaccacttggaagcttgccctgantcatagatgagccactgtcttcttcccctcaattcctcaggatggggaacagccattgggcttttagtagaggagggacaggcccttttgcagcaacagttctcccctgaatgttggatctccacctatacacatggggtacttagccttatggatgcccc

SEQ ID NO: 137 - DNA, 988 bp, Artificial Sequence
  Description of Artificial Sequence: Note = Synthetic Construct
  misc_feature (3)..(3): n is a, c, g, or t
  misc_feature (8)..(9): n is a, c, g, or t
  misc_feature (16)..(16): n is a, c, g, or t
  misc_feature (21)..(21): n is a, c, g, or t
  misc_feature (23)..(23): n is a, c, g, or t
  misc_feature (30)..(30): n is a, c, g, or t
  misc_feature (33)..(33): n is a, c, g, or t
  misc_feature (53)..(53): n is a, c, g, or t
  misc_feature (57)..(57): n is a, c, g, or t
  misc_feature (81)..(82): n is a, c, g, or t
  misc_feature (96)..(96): n is a, c, g, or t
  misc_feature (108)..(108): n is a, c, g, or t
  misc_feature (112)..(112): n is a, c, g, or t
  misc_feature (114)..(114): n is a, c, g, or t
  misc_feature (116)..(116): n is a, c, g, or t
  misc_feature (119)..(119): n is a, c, g, or t
  misc_feature (135)..(135): n is a, c, g, or t
  misc_feature (139)..(139): n is a, c, g, or t
  misc_feature (146)..(146): n is a, c, g, or t
  misc_feature (151)..(151): n is a, c, g, or t
  misc_feature (163)..(163): n is a, c, g, or t
  misc_feature (171)..(171): n is a, c, g, or t
  misc_feature (176)..(176): n is a, c, g, or t
  misc_feature (178)..(178): n is a, c, g, or t
  misc_feature (194)..(194): n is a, c, g, or t
  misc_feature (204)..(205): n is a, c, g, or t
  misc_feature (207)..(207): n is a, c, g, or t
  misc_feature (216)..(216): n is a, c, g, or t
  misc_feature (227)..(227): n is a, c, g, or t
  misc_feature (240)..(240): n is a, c, g, or t
  misc_feature (246)..(246): n is a, c, g, or t
  misc_feature (259)..(259): n is a, c, g, or t
  misc_feature (264)..(264): n is a, c, g, or t
  misc_feature (278)..(278): n is a, c, g, or t
  misc_feature (286)..(286): n is a, c, g, or t
  misc_feature (290)..(290): n is a, c, g, or t
  misc_feature (300)..(300): n is a, c, g, or t
  misc_feature (310)..(310): n is a, c, g, or t
  misc_feature (318)..(318): n is a, c, g, or t
  misc_feature (334)..(334): n is a, c, g, or t
  misc_feature (336)..(336): n is a, c, g, or t
  misc_feature (340)..(340): n is a, c, g, or t
  misc_feature (345)..(345): n is a, c, g, or t
  misc_feature (348)..(348): n is a, c, g, or t
  misc_feature (353)..(353): n is a, c, g, or t
  misc_feature (357)..(357): n is a, c, g, or t
  misc_feature (363)..(363): n is a, c, g, or t
  misc_feature (367)..(367): n is a, c, g, or t
  misc_feature (377)..(377): n is a, c, g, or t
  misc_feature (379)..(379): n is a, c, g, or t
  misc_feature (421)..(421): n is a, c, g, or t
  misc_feature (432)..(432): n is a, c, g, or t
  misc_feature (435)..(435): n is a, c, g, or t
  misc_feature (444)..(444): n is a, c, g, or t
  misc_feature (471)..(471): n is a, c, g, or t
  misc_feature (502)..(502): n is a, c, g, or t
  misc_feature (508)..(508): n is a, c, g, or t
  misc_feature (522)..(522): n is a, c, g, or t
  misc_feature (529)..(529): n is a, c, g, or t
  misc_feature (544)..(544): n is a, c, g, or t
  misc_feature (657)..(657): n is a, c, g, or t
  misc_feature (662)..(662): n is a, c, g, or t
  misc_feature (945)..(945): n is a, c, g, or t
  misc_feature (957)..(957): n is a, c, g, or t
  misc_feature (964)..(964): n is a, c, g, or t
  misc_feature (972)..(972): n is a, c, g, or t
ttnttggnnacgggtntccgnantatgaanccnttcccggggtttttaaaaancccnggatattcggggatttgggttttnnacggcctttttttnagaggccaaatncccntntnaangccttttatccttccntttntgccccncttcnaattaggaagcntggtttgnccgantnttaaggtttttagtcntccttcgttnntntttcccttnttttttccctnaagttataaagcnggtatntggtttgccaggnttctnttgtacccgtcatngcgggttncggnttacccaggntttgttcctnggccggtnccttccaattttggantntccnggtcnggngtccnattnccttgnaacngttccacacntnatgacaattaattgtttcctgtgtaatttgtccccggacttntggattcttgngancagggcctntgtttcatggaagcaaactcccttaantatttaccaggttgattgattaagaaagtantcatgnttgggaaacccacntgttttnttcccaggatggaancccaggattttggaactgcagaggcttcagggtctgggaagcggaggcaggcaaagaatggagtgcactgtccttttgcaatatggggtttgcctgcctgctggctcctctcntgctntctcagatggtgactgaggctacttcagcaggactaggaataatcatgtccaggtggctgcccttccgagcagaaagggacagacgtggggcgatgaagttgctatcgtttttttttttttctgcacagactgcaaagtgtgcagagggagggaggctgtgcaaaaaaaaaaaaaaaaaaaaaaaaaaaaaaaaccgaggacgcagaagttagactgctgacccatttggtgcatgtgtgcccatggagggaggggaccttctcaaaagggttcacgcagcangcattgaaagtnccccacntgtagggncgcaagcaactgagat

SEQ ID NO: 138 - DNA, 665 bp, Artificial Sequence
  Description of Artificial Sequence: Note = Synthetic Construct
  misc_feature (17)..(17): n is a, c, g, or t
  misc_feature (27)..(27): n is a, c, g, or t
  misc_feature (44)..(44): n is a, c, g, or t
  misc_feature (59)..(59): n is a, c, g, or t
  misc_feature (82)..(82): n is a, c, g, or t
  misc_feature (85)..(85): n is a, c, g, or t
  misc_feature (88)..(88): n is a, c, g, or t
  misc_feature (91)..(91): n is a, c, g, or t
  misc_feature (101)..(101): n is a, c, g, or t
  misc_feature (123)..(123): n is a, c, g, or t
  misc_feature (152)..(152): n is a, c, g, or t
  misc_feature (226)..(226): n is a, c, g, or t
  misc_feature (287)..(287): n is a, c, g, or t
  misc_feature (445)..(445): n is a, c, g, or t
  misc_feature (452)..(452): n is a, c, g, or t
  misc_feature (470)..(470): n is a, c, g, or t
gaaaaagattcaggaancttatttttntcggttcgacttcagtnggggaatgggcgganacatttcacacggatttgtaaanacngtnacngaaacttggnggttcgtagatccacttttttnagacctgagagtagtttttaaaatatttnaattaaaggtttcctgcacccacttttttttttatccctaacttttcatccagtatggtttttcaatatcacantttaatctaggactccttgcttaaagcaattacaagttaaattaaaagtaagagatggctnatagctctcattactgggatgcaggtgtgaaacaagtgatttgtgtagaagctggcaggatgggtataaacaagaacacgtgcccagaggatgtattgaaagttggatttaagtctctgagtagtttatgctaggcggtagcattgaacaagatgaantctctgntcatagaggtagaaactncccagattctgaggaagtgtgagggagagcattagatgttactgttggggatttgggaaggccaggaaacgttactccatgcccaaggagggtaggagaaaggtttgggcttagctttgaggacggagggaactggtgggtggatatgaggatggttatgctaaaagcagagtggttttcaactattgttcttct

SEQ ID NO: 139 - DNA, 857 bp, Artificial Sequence
  Description of Artificial Sequence: Note = Synthetic Construct
  misc_feature (24)..(24): n is a, c, g, or t
  misc_feature (26)..(26): n is a, c, g, or t
  misc_feature (32)..(33): n is a, c, g, or t
  misc_feature (35)..(35): n is a, c, g, or t
  misc_feature (37)..(37): n is a, c, g, or t
  misc_feature (40)..(40): n is a, c, g, or t
  misc_feature (45)..(45): n is a, c, g, or t
  misc_feature (49)..(49): n is a, c, g, or t
  misc_feature (53)..(53): n is a, c, g, or t
  misc_feature (59)..(59): n is a, c, g, or t
  misc_feature (69)..(69): n is a, c, g, or t
  misc_feature (75)..(75): n is a, c, g, or t
  misc_feature (90)..(90): n is a, c, g, or t
  misc_feature (94)..(94): n is a, c, g, or t
  misc_feature (109)..(110): n is a, c, g, or t
  misc_feature (119)..(119): n is a, c, g, or t
  misc_feature (135)..(135): n is a, c, g, or t
  misc_feature (139)..(139): n is a, c, g, or t
  misc_feature (142)..(142): n is a, c, g, or t
  misc_feature (149)..(149): n is a, c, g, or t
  misc_feature (164)..(164): n is a, c, g, or t
  misc_feature (177)..(177): n is a, c, g, or t
  misc_feature (190)..(190): n is a, c, g, or t
  misc_feature (197)..(197): n is a, c, g, or t
  misc_feature (212)..(213): n is a, c, g, or t
  misc_feature (221)..(221): n is a, c, g, or t
  misc_feature (226)..(227): n is a, c, g, or t
  misc_feature (237)..(237): n is a, c, g, or t
  misc_feature (244)..(244): n is a, c, g, or t
  misc_feature (247)..(247): n is a, c, g, or t
  misc_feature (249)..(249): n is a, c, g, or t
  misc_feature (264)..(264): n is a, c, g, or t
  misc_feature (285)..(285): n is a, c, g, or t
  misc_feature (289)..(289): n is a, c, g, or t
  misc_feature (306)..(306): n is a, c, g, or t
  misc_feature (314)..(314): n is a, c, g, or t
  misc_feature (318)..(318): n is a, c, g, or t
  misc_feature (328)..(328): n is a, c, g, or t
  misc_feature (347)..(347): n is a, c, g, or t
  misc_feature (435)..(435): n is a, c, g, or t
  misc_feature (458)..(458): n is a, c, g, or t
  misc_feature (464)..(464): n is a, c, g, or t
  misc_feature (474)..(474): n is a, c, g, or t
  misc_feature (476)..(476): n is a, c, g, or t
  misc_feature (480)..(480): n is a, c, g, or t
  misc_feature (495)..(495): n is a, c, g, or t
  misc_feature (534)..(535): n is a, c, g, or t
  misc_feature (547)..(547): n is a, c, g, or t
  misc_feature (556)..(556): n is a, c, g, or t
  misc_feature (559)..(559): n is a, c, g, or t
  misc_feature (562)..(562): n is a, c, g, or t
  misc_feature (576)..(576): n is a, c, g, or t
  misc_feature (578)..(578): n is a, c, g, or t
  misc_feature (587)..(587): n is a, c, g, or t
  misc_feature (595)..(595): n is a, c, g, or t
  misc_feature (597)..(597): n is a, c, g, or t
  misc_feature (599)..(599): n is a, c, g, or t
  misc_feature (601)..(601): n is a, c, g, or t
  misc_feature (605)..(605): n is a, c, g, or t
  misc_feature (618)..(618): n is a, c, g, or t
  misc_feature (626)..(626): n is a, c, g, or t
  misc_feature (634)..(634): n is a, c, g, or t
  misc_feature (645)..(645): n is a, c, g, or t
  misc_feature (648)..(648): n is a, c, g, or t
  misc_feature (654)..(654): n is a, c, g, or t
  misc_feature (659)..(659): n is a, c, g, or t
  misc_feature (666)..(666): n is a, c, g, or t
  misc_feature (671)..(671): n is a, c, g, or t
  misc_feature (697)..(697): n is a, c, g, or t
  misc_feature (714)..(714): n is a, c, g, or t
  misc_feature (744)..(745): n is a, c, g, or t
  misc_feature (752)..(753): n is a, c, g, or t
  misc_feature (756)..(756): n is a, c, g, or t
  misc_feature (758)..(758): n is a, c, g, or t
  misc_feature (763)..(763): n is a, c, g, or t
  misc_feature (766)..(766): n is a, c, g, or t
  misc_feature (772)..(772): n is a, c, g, or t
  misc_feature (814)..(814): n is a, c, g, or t
  misc_feature (848)..(848): n is a, c, g, or t
aaaaaaagaaaggaaaggggagananaaaaannangnganaaaanaganaganagaggnaagaggaagngagggngaaaagagaggaganaaanaagaggaaggagaanngaggaaaangaaaggaacaaaaganaagnganggaaganaaagggagaaaaaanaagagggagaaanggaggagggaaanagagaanagagggggagagaanncagagaanagaanngagaaaaggnggagacnaananagagggaagaaaagngaggagaagagaggggagaanaaanttgaagaagaagaagangagaagangagnagaggaagangaggggaagaagaagaggnggaggagaagaagaggagaggaggaggaaggagaaggaggaggaagagaaggaggaggaagaggagaggagaaggaggaggatactanggaggttgtttcaataaaagagngggatntaagattaananaagnaataatgccggtttntatctgttcggggggggtccttgttctccaaacacaganntgggccagtttntcaaaattnaantgngaagatttcttggntngagagcagntcagattnantngnattnttttctagttttnaacacaanctttgtgntaacaaagagngangattcnagganaactcgnttttntttgggaggagactttgttcctttcnatgaagatgcaggacgnggaagacgcagggtgtgaacaggacacagnnacgcttnngtntntgtcngcntcagcngcgtgggaatgagtcagagcagcacggggaggtgcctggatntaagctttctggtagggagaacagagtgcaggcngcggcccag

SEQ ID NO: 140 - DNA, 902 bp, Artificial Sequence
  Description of Artificial Sequence: Note = Synthetic Construct
  misc_feature (9)..(9): n is a, c, g, or t
  misc_feature (18)..(18): n is a, c, g, or t
  misc_feature (27)..(27): n is a, c, g, or t
  misc_feature (32)..(32): n is a, c, g, or t
  misc_feature (35)..(35): n is a, c, g, or t
  misc_feature (47)..(48): n is a, c, g, or t
  misc_feature (51)..(52): n is a, c, g, or t
  misc_feature (57)..(57): n is a, c, g, or t
  misc_feature (60)..(60): n is a, c, g, or t
  misc_feature (62)..(62): n is a, c, g, or t
  misc_feature (72)..(72): n is a, c, g, or t
  misc_feature (97)..(97): n is a, c, g, or t
  misc_feature (106)..(106): n is a, c, g, or t
  misc_feature (118)..(118): n is a, c, g, or t
  misc_feature (131)..(131): n is a, c, g, or t
  misc_feature (151)..(151): n is a, c, g, or t
  misc_feature (155)..(155): n is a, c, g, or t
  misc_feature (168)..(168): n is a, c, g, or t
  misc_feature (170)..(170): n is a, c, g, or t
  misc_feature (186)..(186): n is a, c, g, or t
  misc_feature (190)..(190): n is a, c, g, or t
  misc_feature (207)..(207): n is a, c, g, or t
  misc_feature (213)..(213): n is a, c, g, or t
  misc_feature (217)..(217): n is a, c, g, or t
  misc_feature (228)..(228): n is a, c, g, or t
  misc_feature (230)..(230): n is a, c, g, or t
  misc_feature (232)..(232): n is a, c, g, or t
  misc_feature (234)..(234): n is a, c, g, or t
  misc_feature (248)..(248): n is a, c, g, or t
  misc_feature (257)..(257): n is a, c, g, or t
  misc_feature (264)..(264): n is a, c, g, or t
  misc_feature (266)..(266): n is a, c, g, or t
  misc_feature (271)..(272): n is a, c, g, or t
  misc_feature (279)..(280): n is a, c, g, or t
  misc_feature (285)..(285): n is a, c, g, or t
  misc_feature (292)..(292): n is a, c, g, or t
  misc_feature (303)..(303): n is a, c, g, or t
  misc_feature (305)..(305): n is a, c, g, or t
  misc_feature (317)..(317): n is a, c, g, or t
  misc_feature (330)..(330): n is a, c, g, or t
  misc_feature (346)..(346): n is a, c, g, or t
  misc_feature (361)..(361): n is a, c, g, or t
  misc_feature (372)..(372): n is a, c, g, or t
  misc_feature (378)..(378): n is a, c, g, or t
  misc_feature (395)..(395): n is a, c, g, or t
  misc_feature (402)..(402): n is a, c, g, or t
  misc_feature (407)..(407): n is a, c, g, or t
  misc_feature (430)..(430): n is a, c, g, or t
  misc_feature (447)..(447): n is a, c, g, or t
  misc_feature (462)..(462): n is a, c, g, or t
  misc_feature (472)..(472): n is a, c, g, or t
  misc_feature (477)..(477): n is a, c, g, or t
  misc_feature (484)..(485): n is a, c, g, or t
  misc_feature (494)..(495): n is a, c, g, or t
  misc_feature (511)..(511): n is a, c, g, or t
  misc_feature (536)..(536): n is a, c, g, or t
  misc_feature (559)..(559): n is a, c, g, or t
  misc_feature (564)..(564): n is a, c, g, or t
  misc_feature (588)..(588): n is a, c, g, or t
  misc_feature (595)..(595): n is a, c, g, or t
  misc_feature (606)..(606): n is a, c, g, or t
  misc_feature (609)..(609): n is a, c, g, or t
  misc_feature (620)..(620): n is a, c, g, or t
  misc_feature (629)..(629): n is a, c, g, or t
  misc_feature (663)..(663): n is a, c, g, or t
  misc_feature (750)..(750): n is a, c, g, or t
  misc_feature (762)..(762): n is a, c, g, or t
  misc_feature (769)..(769): n is a, c, g, or t
  misc_feature (804)..(804): n is a, c, g, or t
  misc_feature (820)..(820): n is a, c, g, or t
  misc_feature (822)..(822): n is a, c, g, or t
  misc_feature (842)..(842): n is a, c, g, or t
  misc_feature (897)..(897): n is a, c, g, or t
aaagggggngggaagaangaaaagggnaaacnttngtttggaagccnncannaaagnaangncgaatttaanaagggggtagggaaaaaaaaaacanaatattccntccttagccatnaaccgaacttccngcaaggaaaaaaaatttggngggngtaaagggcaccncntcccacaaaattttgntaantttgggcgcaaattcangcaggntttngttggaaaggngnananaccaaagggatttnggggatttnaaaatcngngtttnnggcaggnnatccngaagttngaatcggacgncnaccctttatttnagcagttatttangggaacatgggagggnaccatttcaaaccanggatcgggccnggagtntgagtgttcagcccacngccttcnaacantaccgggataagtttttccctgngccagagacccatccangttccagcaaaaggntggtcatctngggcnagctccnngagtcatcnngggtttctcccagccnggggccaatggtcgaaggcaggttntttttgtctccagcttgttcccnaccgngggagcctgtcaaggctgcacagnaccagantagtggtcatntcnggctagctccnttagctccntgtccaggggacttcctggcactggattagtggnggactcaggcttgcttttttttcaggagaggttagattactaatcattcagatgttcataagtcagaacactgagcaaagcaatagnttctcctccacntactgantcacacgtgcacaacagccacacccgcaatgcttntaggagcaggtccagngnacttttgttttaactatttntggctctttattaatcagcacataaatacgcttcgtttctcctttttcaatatgnatgtg

SEQ ID NO: 141 - DNA, 852 bp, Artificial Sequence
  Description of Artificial Sequence: Note = Synthetic Construct
  misc_feature (17)..(17): n is a, c, g, or t
  misc_feature (28)..(28): n is a, c, g, or t
  misc_feature (31)..(31): n is a, c, g, or t
  misc_feature (36)..(36): n is a, c, g, or t
  misc_feature (40)..(40): n is a, c, g, or t
  misc_feature (42)..(42): n is a, c, g, or t
  misc_feature (51)..(51): n is a, c, g, or t
  misc_feature (89)..(89): n is a, c, g, or t
  misc_feature (93)..(94): n is a, c, g, or t
  misc_feature (101)..(101): n is a, c, g, or t
  misc_feature (109)..(109): n is a, c, g, or t
  misc_feature (111)..(111): n is a, c, g, or t
  misc_feature (116)..(116): n is a, c, g, or t
  misc_feature (127)..(130): n is a, c, g, or t
  misc_feature (135)..(135): n is a, c, g, or t
  misc_feature (152)..(152): n is a, c, g, or t
  misc_feature (158)..(158): n is a, c, g, or t
  misc_feature (162)..(162): n is a, c, g, or t
  misc_feature (164)..(164): n is a, c, g, or t
  misc_feature (170)..(173): n is a, c, g, or t
  misc_feature (175)..(175): n is a, c, g, or t
  misc_feature (177)..(177): n is a, c, g, or t
  misc_feature (206)..(207): n is a, c, g, or t
  misc_feature (209)..(209): n is a, c, g, or t
  misc_feature (212)..(215): n is a, c, g, or t
  misc_feature (217)..(218): n is a, c, g, or t
  misc_feature (220)..(220): n is a, c, g, or t
  misc_feature (222)..(226): n is a, c, g, or t
  misc_feature (235)..(235): n is a, c, g, or t
  misc_feature (245)..(245): n is a, c, g, or t
  misc_feature (256)..(256): n is a, c, g, or t
  misc_feature (264)..(264): n is a, c, g, or t
  misc_feature (279)..(279): n is a, c, g, or t
  misc_feature (293)..(293): n is a, c, g, or t
  misc_feature (311)..(311): n is a, c, g, or t
  misc_feature (391)..(391): n is a, c, g, or t
  misc_feature (403)..(403): n is a, c, g, or t
  misc_feature (424)..(424): n is a, c, g, or t
  misc_feature (431)..(431): n is a, c, g, or t
  misc_feature (496)..(496): n is a, c, g, or t
  misc_feature (533)..(533): n is a, c, g, or t
  misc_feature (537)..(537): n is a, c, g, or t
  misc_feature (544)..(544): n is a, c, g, or t
  misc_feature (554)..(554): n is a, c, g, or t
  misc_feature (563)..(563): n is a, c, g, or t
  misc_feature (565)..(565): n is a, c, g, or t
  misc_feature (601)..(601): n is a, c, g, or t
  misc_feature (605)..(605): n is a, c, g, or t
  misc_feature (623)..(623): n is a, c, g, or t
  misc_feature (643)..(643): n is a, c, g, or t
  misc_feature (669)..(669): n is a, c, g, or t
  misc_feature (731)..(732): n is a, c, g, or t
  misc_feature (801)..(801): n is a, c, g, or t
  misc_feature (804)..(804): n is a, c, g, or t
acagagggggggggggngtggaattttnggnaggangttntnggaaggccnctaaaaaagaaatgttcccagaccaaaagggggggggnagtnnaattcanggatcctnangaggnggaaatttttnnnntattnaggatcaggataaatangaaaangggnanattttnnnnangngggtttttttttttttttttttttttttnngnggnnnnannanannnnnaaatggcgncgggcatggntaatggggaanttgggganaattacagagatttntttttcccatgggnttccaggatgaattcagntaccaaccaggttggtaccagcattttaacattcgagttagacatcaatggttaggtcgggagtgagaggttcggggccngacatatattcntggtgaacccagtgcaccttntggtttntacaaggagcttgaggtagtcgcccaccagtagctgtcaggcaggtggcttaagttcagaaccgnttcgtggaacccgagaagcagaaaaagacataagttntgcngcttcanaatccactcntgaatacananatctcggccaaagaagcacagccagtctttccgttnacangaggccgggagcaacaantccacagccagcccaagganatacaaaggacttgggtcagttctgnaccagttggagtcagagatggggccctcaaagtcccagcagtgaagggcatggtctccagcnnacagtggaacctttaagaggtggggacttgtaggaggagttagataattggggtgtgcctttgtccccnacntcgttctttccctctttatggccttgatgtggacaagattgtttctgc

SEQ ID NO: 142 - DNA, 884 bp, Artificial Sequence
  Description of Artificial Sequence:  Note = Synthetic Construct
  misc_feature (11)..(11): n is a, c, g, or t
  misc_feature (19)..(19): n is a, c, g, or t
  misc_feature (23)..(23): n is a, c, g, or t
  misc_feature (34)..(34): n is a, c, g, or t
  misc_feature (61)..(61): n is a, c, g, or t
  misc_feature (67)..(67): n is a, c, g, or t
  misc_feature (79)..(79): n is a, c, g, or t
  misc_feature (89)..(89): n is a, c, g, or t
  misc_feature (97)..(97): n is a, c, g, or t
  misc_feature (105)..(106): n is a, c, g, or t
  misc_feature (111)..(111): n is a, c, g, or t
  misc_feature (127)..(127): n is a, c, g, or t
  misc_feature (140)..(140): n is a, c, g, or t
  misc_feature (145)..(146): n is a, c, g, or t
  misc_feature (149)..(149): n is a, c, g, or t
  misc_feature (151)..(151): n is a, c, g, or t
  misc_feature (218)..(218): n is a, c, g, or t
  misc_feature (230)..(230): n is a, c, g, or t
  misc_feature (259)..(259): n is a, c, g, or t
  misc_feature (261)..(261): n is a, c, g, or t
  misc_feature (271)..(272): n is a, c, g, or t
  misc_feature (278)..(278): n is a, c, g, or t
  misc_feature (303)..(303): n is a, c, g, or t
  misc_feature (314)..(314): n is a, c, g, or t
  misc_feature (339)..(339): n is a, c, g, or t
  misc_feature (341)..(341): n is a, c, g, or t
  misc_feature (343)..(343): n is a, c, g, or t
  misc_feature (345)..(345): n is a, c, g, or t
  misc_feature (353)..(353): n is a, c, g, or t
  misc_feature (362)..(362): n is a, c, g, or t
  misc_feature (379)..(379): n is a, c, g, or t
  misc_feature (383)..(384): n is a, c, g, or t
  misc_feature (388)..(389): n is a, c, g, or t
  misc_feature (401)..(401): n is a, c, g, or t
  misc_feature (405)..(405): n is a, c, g, or t
  misc_feature (419)..(419): n is a, c, g, or t
  misc_feature (431)..(431): n is a, c, g, or t
  misc_feature (448)..(448): n is a, c, g, or t
  misc_feature (453)..(453): n is a, c, g, or t
  misc_feature (478)..(478): n is a, c, g, or t
  misc_feature (496)..(496): n is a, c, g, or t
  misc_feature (565)..(566): n is a, c, g, or t
  misc_feature (582)..(582): n is a, c, g, or t
  misc_feature (599)..(599): n is a, c, g, or t
  misc_feature (602)..(602): n is a, c, g, or t
  misc_feature (683)..(684): n is a, c, g, or t
  misc_feature (737)..(737): n is a, c, g, or t
aaaaaaaattntttttccnaggnaaataacccgngcttaaccgggcgggggagatcaattntttgtngttgtttcctcngaggcggagngtcaaaanagaacacnnctggnaaaccccccttaaaanacaaaaatttganggggnnggngngttacaaaaagacaggatgttttccgagtcggattcaatcccaccacaacatggggttcacaccatngtaaggaatcgntgcctttttgggggtatcctagggggtananttccaaatanngataanaatttttttaaaaatttaattgtanatatttattanataatttaataaataatatttggananantnatgttctngcgccttgnggactggtagttttttntccnnattnnaactttcccagnactnggtagcctatgtgnttatgcaacccnttagaagctgccttcantattnaactcatactgtttctcgataatcnggggagtagctccagttngctatgaagctgcggaaaggtaggcggacatcccaggcttagacagagttcaggttatttggaactttnnaacagaagtgtgttcntgcacggcagcaagacnatntgggtcccgtagttccggtcgccaggagtagtgtattgcttaggaccattctgggtggaatgcatctggtgggtcttaaannatgtcaggcagggcctggcaccagggtctggcgggaagcctcacataccgttntaatgacttcatctgcttagaatttgtggggaaacgatgcagaaaaatctaaccagggatgtttctgggccagtcatgttggggatgcctcagtcatgtaaaattgagctccccctggagcacaccttaaaacatcttctgtttaat

SEQ ID NO: 143 - DNA, 955 bp, Artificial Sequence
  Description of Artificial Sequence: Note = Synthetic Construct
  misc_feature (4)..(4): n is a, c, g, or t
  misc_feature (14)..(14): n is a, c, g, or t
  misc_feature (17)..(17): n is a, c, g, or t
  misc_feature (19)..(19): n is a, c, g, or t
  misc_feature (24)..(24): n is a, c, g, or t
  misc_feature (26)..(28): n is a, c, g, or t
  misc_feature (30)..(30): n is a, c, g, or t
  misc_feature (32)..(32): n is a, c, g, or t
  misc_feature (36)..(36): n is a, c, g, or t
  misc_feature (42)..(42): n is a, c, g, or t
  misc_feature (57)..(57): n is a, c, g, or t
  misc_feature (66)..(66): n is a, c, g, or t
  misc_feature (71)..(73): n is a, c, g, or t
  misc_feature (84)..(84): n is a, c, g, or t
  misc_feature (95)..(95): n is a, c, g, or t
  misc_feature (106)..(107): n is a, c, g, or t
  misc_feature (113)..(113): n is a, c, g, or t
  misc_feature (115)..(115): n is a, c, g, or t
  misc_feature (123)..(124): n is a, c, g, or t
  misc_feature (140)..(140): n is a, c, g, or t
  misc_feature (144)..(144): n is a, c, g, or t
  misc_feature (170)..(170): n is a, c, g, or t
  misc_feature (176)..(176): n is a, c, g, or t
  misc_feature (185)..(185): n is a, c, g, or t
  misc_feature (203)..(203): n is a, c, g, or t
  misc_feature (205)..(205): n is a, c, g, or t
  misc_feature (218)..(218): n is a, c, g, or t
  misc_feature (220)..(220): n is a, c, g, or t
  misc_feature (222)..(222): n is a, c, g, or t
  misc_feature (224)..(224): n is a, c, g, or t
  misc_feature (226)..(226): n is a, c, g, or t
  misc_feature (228)..(228): n is a, c, g, or t
  misc_feature (245)..(245): n is a, c, g, or t
  misc_feature (251)..(252): n is a, c, g, or t
  misc_feature (260)..(260): n is a, c, g, or t
  misc_feature (273)..(273): n is a, c, g, or t
  misc_feature (307)..(307): n is a, c, g, or t
  misc_feature (314)..(314): n is a, c, g, or t
  misc_feature (449)..(449): n is a, c, g, or t
  misc_feature (460)..(460): n is a, c, g, or t
  misc_feature (485)..(485): n is a, c, g, or t
  misc_feature (512)..(512): n is a, c, g, or t
  misc_feature (559)..(560): n is a, c, g, or t
  misc_feature (562)..(562): n is a, c, g, or t
  misc_feature (586)..(586): n is a, c, g, or t
  misc_feature (601)..(601): n is a, c, g, or t
  misc_feature (655)..(655): n is a, c, g, or t
  misc_feature (707)..(707): n is a, c, g, or t
  misc_feature (742)..(742): n is a, c, g, or t
  misc_feature (793)..(793): n is a, c, g, or t
  misc_feature (905)..(905): n is a, c, g, or t
  misc_feature (935)..(935): n is a, c, g, or t
  misc_feature (954)..(954): n is a, c, g, or t
cccntggaaaaccnaananaatangnnnananaaanactccncccattgagggaacnttttagggnttccnnntttccccgganccgccaaatgngacaccaaaanngaccgnantctttggnngttgcttctcttggancgcnttttgttcgaccggggtgactaaggncatgtnggggacgantaattgtttccgggggcngntcggcaccttccnangngngngnggtttggttctggaagnccgaannggcatgtnttaagatttgccnatccatttagggttcgttcaacgccttatctttngagtttntggagtttgggtggggaggggagatttagtggaggagtaaatttttagtagggagagagggaagggagatagacccggagacagagaagggagggaggaagggagggattatcctgtaggatgtgagcccagacntgtctgtggtntctttccatgacacaagagactttntgcttgtccctagaatgcttcattttntagtgtctcaaacttaaagggctagtgtaaagttagactgtgaacanntngtaaacacaggtgacaggaatgtntgtcagctgggcccnttatatgccacggcagagtggtacgtgatgcccccacatgttatgtggaagttntcatgcagggcttcagaacacagtagatggagattgtgaaaatctgttgttnacttaagagactggccccaaggatccatgtgatgntacttctgttgcttgtgctttaaaatcttatgtgatgttttgcagactccnttcgggaccccagcacacagctgagagtctgccctgctggcactgctgcctgtctgctgaaggggaacccaggcatttgatgttggccggcccaaggaggggctgaagctantgagcaaggacagtgatagacccacacagnagtttgcaagtaaatgagnc

SEQ ID NO: 144 - DNA, 1107 bp, Artificial Sequence
  Description of Artificial Sequence: Note = Synthetic Construct
  misc_feature (5)..(7): n is a, c, g, or t
  misc_feature (11)..(11): n is a, c, g, or t
  misc_feature (15)..(15): n is a, c, g, or t
  misc_feature (17)..(18): n is a, c, g, or t
  misc_feature (20)..(20): n is a, c, g, or t
  misc_feature (23)..(23): n is a, c, g, or t
  misc_feature (41)..(41): n is a, c, g, or t
  misc_feature (52)..(52): n is a, c, g, or t
  misc_feature (55)..(55): n is a, c, g, or t
  misc_feature (66)..(67): n is a, c, g, or t
  misc_feature (75)..(75): n is a, c, g, or t
  misc_feature (78)..(78): n is a, c, g, or t
  misc_feature (121)..(121): n is a, c, g, or t
  misc_feature (127)..(127): n is a, c, g, or t
  misc_feature (132)..(132): n is a, c, g, or t
  misc_feature (150)..(150): n is a, c, g, or t
  misc_feature (164)..(164): n is a, c, g, or t
  misc_feature (194)..(194): n is a, c, g, or t
  misc_feature (200)..(200): n is a, c, g, or t
  misc_feature (203)..(203): n is a, c, g, or t
  misc_feature (210)..(210): n is a, c, g, or t
  misc_feature (216)..(216): n is a, c, g, or t
  misc_feature (225)..(225): n is a, c, g, or t
  misc_feature (240)..(240): n is a, c, g, or t
  misc_feature (249)..(249): n is a, c, g, or t
  misc_feature (256)..(256): n is a, c, g, or t
  misc_feature (288)..(288): n is a, c, g, or t
  misc_feature (326)..(326): n is a, c, g, or t
  misc_feature (339)..(339): n is a, c, g, or t
  misc_feature (348)..(348): n is a, c, g, or t
  misc_feature (361)..(361): n is a, c, g, or t
  misc_feature (381)..(381): n is a, c, g, or t
  misc_feature (383)..(383): n is a, c, g, or t
  misc_feature (389)..(389): n is a, c, g, or t
  misc_feature (398)..(398): n is a, c, g, or t
  misc_feature (411)..(411): n is a, c, g, or t
  misc_feature (414)..(414): n is a, c, g, or t
  misc_feature (426)..(426): n is a, c, g, or t
  misc_feature (529)..(529): n is a, c, g, or t
  misc_feature (574)..(574): n is a, c, g, or t
  misc_feature (577)..(577): n is a, c, g, or t
  misc_feature (579)..(579): n is a, c, g, or t
  misc_feature (607)..(607): n is a, c, g, or t
  misc_feature (664)..(664): n is a, c, g, or t
  misc_feature (674)..(674): n is a, c, g, or t
  misc_feature (696)..(696): n is a, c, g, or t
  misc_feature (699)..(699): n is a, c, g, or t
  misc_feature (738)..(738): n is a, c, g, or t
  misc_feature (1074)..(1074): n is a, c, g, or t
caaannncaanggtncnncnggnccattggggggggttaanaatggaggggnttngggttttaaannttcccccnggnttcaaggaaatggggcttttgattggcaaggaaggaatggggnttcccntgaancctcctgaggggccaaanattggggggggttnacacccccggggaaacccttcttgaccccnagaaangcngtttagnttcccncccatgggntcccttaccctgggntttttttgnacagccnagcagccctggttttccttgtttccttgggcnccgaaaatttgaatccagtgcattccaccattgagccngcagaggttgatnggcaggaanggtttaacccttngaccaggagtgacaaatttngngggacnccccagtgngagctcacaacangtngacattgaggcnccaaaggattgttgaggggatggattgtgtcgcagtctggttgcctttatagtgccagcatcgttgagccccgcccagggagtgttggcacgcccaaaccccnacccagcgcttgaggcaaggcaaacacacttcccagccccttaanttncnacgcctttgttgcttggacgtcccggantgggagcaggatgaaggattttagtgcaggagaagaccagtgcaagccggagacatngagttccctntaattcggtgttcagtttgccnttntggcacgtgactcgtaactctggtatgtgtgctgaaccntctaccagccagagatcagtgtccttaaagttcgaatcagtgtgagggggactgggaacaatactgatgctgttgccctctagtggcaaggtcaactccaagcgagaggggaagcagtcagtctaccgcatcctctaagatagtggttctcgacctctctaatactgcggattaatacattcttcatgttgtggtgacgctccaaccataaagtgattttcgttgctgcttcataactatatttttgctactgttatgaatcgtgacataaatactgtgttttcagatggtctcaggcaattcctgtgaaaggggtctcccacaggtttgaaagtntcccacctgtaggtgggccaagctaaatgagat

SEQ ID NO: 145 - DNA, 92 bp, Artificial Sequence
  Description of Artificial Sequence: Note = Synthetic Construct
  misc_feature (48)..(48): n is a, c, g, or t
  misc_feature (77)..(77): n is a, c, g, or t
  misc_feature (79)..(79): n is a, c, g, or t
atggggcatcttgtaacaggaggcctggattgagtactgtaactgagntcttgaaagactttacctgtaggtttggncngcttgaaagagat

SEQ ID NO: 146 - DNA, 209 bp, Artificial Sequence
  Description of Artificial Sequence: Note = Synthetic Construct
  misc_feature (108)..(108): n is a, c, g, or t
  misc_feature (136)..(136): n is a, c, g, or t
  misc_feature (151)..(152): n is a, c, g, or t
  misc_feature (162)..(163): n is a, c, g, or t
  misc_feature (165)..(165): n is a, c, g, or t
  misc_feature (195)..(195): n is a, c, g, or t
aattccagcccatcctgagacacacagtgaccctgtctcacaaaaccagggaaaagccaggtgcggagtctcacgcctttaatctcagtctccggaaacagaggcagngggatctctgtgagttcccaggcgaganttctttgtacagggnnccctctgaanncncctgaaagatttcacctgtaggttgggccnagcttaaaagagat

SEQ ID NO: 147 - DNA, 97 bp, Artificial Sequence
  Description of Artificial Sequence: Note = Synthetic Construct
acagagaaacagtgtttccgttccttaaaacgttgctctatcttgaataacaagcttattacatgcgaatcgtattgggaacctactgaattccgat

SEQ ID NO: 148 - DNA, 1047 bp, Artificial Sequence
  Description of Artificial Sequence: Note = Synthetic Construct
  misc_feature (15)..(15): n is a, c, g, or t
  misc_feature (20)..(20): n is a, c, g, or t
  misc_feature (25)..(26): n is a, c, g, or t
  misc_feature (31)..(31): n is a, c, g, or t
  misc_feature (38)..(38): n is a, c, g, or t
  misc_feature (44)..(44): n is a, c, g, or t
  misc_feature (52)..(52): n is a, c, g, or t
  misc_feature (58)..(59): n is a, c, g, or t
  misc_feature (68)..(68): n is a, c, g, or t
  misc_feature (71)..(71): n is a, c, g, or t
  misc_feature (79)..(79): n is a, c, g, or t
  misc_feature (99)..(99): n is a, c, g, or t
  misc_feature (126)..(126): n is a, c, g, or t
  misc_feature (131)..(131): n is a, c, g, or t
  misc_feature (161)..(161): n is a, c, g, or t
  misc_feature (176)..(176): n is a, c, g, or t
  misc_feature (181)..(181): n is a, c, g, or t
  misc_feature (193)..(194): n is a, c, g, or t
  misc_feature (207)..(207): n is a, c, g, or t
  misc_feature (211)..(211): n is a, c, g, or t
  misc_feature (215)..(215): n is a, c, g, or t
  misc_feature (242)..(242): n is a, c, g, or t
  misc_feature (248)..(248): n is a, c, g, or t
  misc_feature (258)..(258): n is a, c, g, or t
  misc_feature (267)..(267): n is a, c, g, or t
  misc_feature (284)..(284): n is a, c, g, or t
  misc_feature (298)..(298): n is a, c, g, or t
  misc_feature (332)..(333): n is a, c, g, or t
  misc_feature (345)..(345): n is a, c, g, or t
  misc_feature (372)..(372): n is a, c, g, or t
  misc_feature (374)..(374): n is a, c, g, or t
  misc_feature (380)..(380): n is a, c, g, or t
  misc_feature (388)..(388): n is a, c, g, or t
  misc_feature (394)..(394): n is a, c, g, or t
  misc_feature (397)..(397): n is a, c, g, or t
  misc_feature (403)..(403): n is a, c, g, or t
  misc_feature (406)..(406): n is a, c, g, or t
  misc_feature (413)..(413): n is a, c, g, or t
  misc_feature (420)..(420): n is a, c, g, or t
  misc_feature (426)..(426): n is a, c, g, or t
  misc_feature (452)..(452): n is a, c, g, or t
  misc_feature (548)..(548): n is a, c, g, or t
  misc_feature (550)..(550): n is a, c, g, or t
  misc_feature (653)..(653): n is a, c, g, or t
  misc_feature (713)..(713): n is a, c, g, or t
  misc_feature (1015)..(1015): n is a, c, g, or t
  misc_feature (1018)..(1018): n is a, c, g, or t
  misc_feature (1034)..(1034): n is a, c, g, or t
caaggtgaattccanttggngtttnnaaatngtttttnaaaaanaaattttntttggnnattgccttnaangtttgggncctgaattcaaaattccaanttacccaaaatttcatgttccatccanaattnaattccggaaatttacaataatttgaattntagttttcccaattntaatntcagtagtttgnntttgtgtgccccnattntaanatcagacccgtccaatcacccaattgntttttnaaattgaatngttttcccntgtaccttccttgcaangttgctttaaattngaatttcagaatccccattgaaaagaatccgggnnaaagcaacaccnttaaggaccccaggaaaccagaaattngnagaaanttggacgnaggganttnacattnttnccgccanaggatgnttgggntaaaaaccgcgtttgcgcaaggctcntgtgttggcctcttttccgccgggggcgctgtggataatctctgggtcagtcgaaccgttttaccatccatttcgttactccgagagactggcgcncngcgggttcctccaagatggcggcgcagaggaggagcttgctccagagtgtgaggaaaccgacccgctctctgggctgggagggttgggagctcgggtgtgtcntcgggtgcagaagctgttgtctttagatggcagagtgcggacccctcgccccagaggccntagggtgcttgcagcgcgcgcaagaccctttccagtctagagcctcgcctagttctgcgcgtgcgcgccacagagccgggcctctgagggtcaagggcgccggggtcctgcggaatgggagcgtcctcaagccggaaagggacatggcgccgccgagcgggccatccggagggcggacacgactaataataaatcgcccccccgcccccgcttgtgtaaggcgcgctgtatctctggcattgtgtggaccgcctcacattcataagcttcgtcagcagcagtagagaatggcttgaaagacnttnacctgtaggtttggcnagctttaaaagat

SEQ ID NO: 149 - DNA, 1063 bp, Artificial Sequence
  Description of Artificial Sequence: Note = Synthetic Construct
  misc_feature (4)..(4): n is a, c, g, or t
  misc_feature (19)..(19): n is a, c, g, or t
  misc_feature (24)..(24): n is a, c, g, or t
  misc_feature (26)..(26): n is a, c, g, or t
  misc_feature (29)..(30): n is a, c, g, or t
  misc_feature (35)..(35): n is a, c, g, or t
  misc_feature (37)..(37): n is a, c, g, or t
  misc_feature (51)..(51): n is a, c, g, or t
  misc_feature (53)..(53): n is a, c, g, or t
  misc_feature (70)..(70): n is a, c, g, or t
  misc_feature (73)..(74): n is a, c, g, or t
  misc_feature (104)..(104): n is a, c, g, or t
  misc_feature (123)..(123): n is a, c, g, or t
  misc_feature (134)..(134): n is a, c, g, or t
  misc_feature (136)..(136): n is a, c, g, or t
  misc_feature (151)..(151): n is a, c, g, or t
  misc_feature (182)..(182): n is a, c, g, or t
  misc_feature (195)..(196): n is a, c, g, or t
  misc_feature (213)..(213): n is a, c, g, or t
  misc_feature (217)..(217): n is a, c, g, or t
  misc_feature (232)..(232): n is a, c, g, or t
  misc_feature (247)..(247): n is a, c, g, or t
  misc_feature (274)..(274): n is a, c, g, or t
  misc_feature (323)..(323): n is a, c, g, or t
  misc_feature (330)..(330): n is a, c, g, or t
  misc_feature (361)..(361): n is a, c, g, or t
  misc_feature (508)..(508): n is a, c, g, or t
  misc_feature (520)..(520): n is a, c, g, or t
  misc_feature (582)..(582): n is a, c, g, or t
  misc_feature (600)..(600): n is a, c, g, or t
  misc_feature (997)..(997): n is a, c, g, or t
  misc_feature (1049)..(1049): n is a, c, g, or t
  misc_feature (1055)..(1055): n is a, c, g, or t
catnggagttcccaatggnttccntnaannggttntnttcaggttgggcancntttaggaattgaaaatnttnnttgggattcccctagaatttgatcccattngggaaattttttatttccngaacagtccantnttaaaattgggcctnttgggattaacggattccaaggttgcaacanattggcaagtttnnggacaggaggtttcaantggntaaagtggataaatngtgaattttggaganggaattgacttggttgggggccaaaantaggtagcattttgcccggagggttgattgcattctgttttgtgtaaanatgaagntacttgacagctttgagataagaaggagacntaatttgctaaacattttaagtgttctattctgccggagttttggagagggtatatgccggtcaggaagggagccagaagccagtaacattgcaagtatttcaacatggaaagctttaggttatctcttgtgcatcttatgctcggntaatgatgtaanccaattgtaattctgggcacagctttcccatgtgtctttggaacagtctgggtttgtggttntaaaacaacatttgtatntagttggaggcttatctaaggagcttcttagcatttgggttgtaatttattttagtattgtttcagctacccattgctacatagtaaatgtacaaaaatttagtggattaaaataatgatgtttggtttgctcacgaatctttcatgttggctgaagttgccatttctgcttctctctgctgaacttggcatcaactgagagggttggaatcatctgaagatggggttagccacacctcgcagttgatattggctgtcagttggaacctcagctggggtcagcatgcataagtaagcatgtgtcacttttccaggtttctgtcttacagcatggtggcttggttctgaagggccatcactctaatggtggctgggttcccagcgagaaccagtggancccaaggatagcttttggtgactgaaagactttaacctgtaggttggggccnagctanaaagagat

SEQ ID NO: 150 - DNA, 815 bp, Artificial Sequence
  Description of Artificial Sequence: Note = Synthetic Construct
  misc_feature (32)..(32): n is a, c, g, or t
  misc_feature (56)..(56): n is a, c, g, or t
  misc_feature (67)..(67): n is a, c, g, or t
  misc_feature (69)..(69): n is a, c, g, or t
  misc_feature (82)..(82): n is a, c, g, or t
  misc_feature (86)..(86): n is a, c, g, or t
  misc_feature (90)..(90): n is a, c, g, or t
  misc_feature (93)..(93): n is a, c, g, or t
  misc_feature (100)..(100): n is a, c, g, or t
  misc_feature (102)..(102): n is a, c, g, or t
  misc_feature (137)..(137): n is a, c, g, or t
  misc_feature (143)..(143): n is a, c, g, or t
  misc_feature (154)..(155): n is a, c, g, or t
  misc_feature (168)..(168): n is a, c, g, or t
  misc_feature (171)..(171): n is a, c, g, or t
  misc_feature (178)..(178): n is a, c, g, or t
  misc_feature (194)..(194): n is a, c, g, or t
  misc_feature (202)..(202): n is a, c, g, or t
  misc_feature (223)..(224): n is a, c, g, or t
  misc_feature (233)..(233): n is a, c, g, or t
  misc_feature (247)..(247): n is a, c, g, or t
  misc_feature (250)..(250): n is a, c, g, or t
  misc_feature (252)..(252): n is a, c, g, or t
  misc_feature (256)..(256): n is a, c, g, or t
  misc_feature (263)..(263): n is a, c, g, or t
  misc_feature (270)..(270): n is a, c, g, or t
  misc_feature (275)..(276): n is a, c, g, or t
  misc_feature (278)..(278): n is a, c, g, or t
  misc_feature (281)..(282): n is a, c, g, or t
  misc_feature (293)..(293): n is a, c, g, or t
  misc_feature (296)..(296): n is a, c, g, or t
  misc_feature (298)..(298): n is a, c, g, or t
  misc_feature (303)..(303): n is a, c, g, or t
  misc_feature (308)..(308): n is a, c, g, or t
  misc_feature (312)..(312): n is a, c, g, or t
  misc_feature (315)..(315): n is a, c, g, or t
  misc_feature (322)..(322): n is a, c, g, or t
  misc_feature (326)..(328): n is a, c, g, or t
  misc_feature (331)..(332): n is a, c, g, or t
  misc_feature (336)..(336): n is a, c, g, or t
  misc_feature (346)..(347): n is a, c, g, or t
  misc_feature (349)..(350): n is a, c, g, or t
  misc_feature (355)..(355): n is a, c, g, or t
  misc_feature (359)..(359): n is a, c, g, or t
  misc_feature (378)..(378): n is a, c, g, or t
  misc_feature (382)..(383): n is a, c, g, or t
  misc_feature (436)..(436): n is a, c, g, or t
  misc_feature (786)..(786): n is a, c, g, or t
ccccccccccaaaccttccttccaaacccttnggggtggggaaaacattgggcaanggggcaaattnanaccccttggaatngttngccnggnaaagttncngttccccaaaagccaaagggggggggtttccaaanattccnggggttttttnngggggtaaagggnttnaaaggtnaaaaaatgttcccggngcccccanacttccaaaggttttcccttnnaaaattccnggccttccgggggnccntntgtnccccccnttccccnaaatnncnttnngaaaagggttnaanantgttnaaaancccnaangttaaangggnnnatnnaaanggtttccctnncnnggggngggnaaaaaggtttcgcgcgganaccnntgatgcccaggttcagtttccccggagcttggggccagacccgcggcgcgccntgggtgtggcgggagcgcgcgggcttgcgcccggacggcttctccccgcccccgactcccctccgcggcggcgggagtaggttcttccggctccggtctgaggcggtgcctggcaccttctgaccaggatccgcgggtccccgtgctgtggtcccgggaggcacgcggggcctgcctgctatagcgggtttgcagggcgagcctccctggagcggtagggtcggtttgggtgttgcacgctcggtttgacgttttaatccggaggagttgtggggttcctcgaatctcaaactgccttcttcccttttgagacttgaaaatacccgaagcctgccttgtactgaaagacnttacctgtaggtttggcagcttaaaagat

SEQ ID NO: 151 - DNA, 1034 bp, Artificial Sequence
  Description of Artificial Sequence: Note = Synthetic Construct
  misc_feature (7)..(7): n is a, c, g, or t
  misc_feature (18)..(18): n is a, c, g, or t
  misc_feature (22)..(22): n is a, c, g, or t
  misc_feature (29)..(29): n is a, c, g, or t
  misc_feature (34)..(34): n is a, c, g, or t
  misc_feature (37)..(37): n is a, c, g, or t
  misc_feature (42)..(43): n is a, c, g, or t
  misc_feature (46)..(46): n is a, c, g, or t
  misc_feature (48)..(48): n is a, c, g, or t
  misc_feature (50)..(50): n is a, c, g, or t
  misc_feature (56)..(56): n is a, c, g, or t
  misc_feature (61)..(61): n is a, c, g, or t
  misc_feature (65)..(65): n is a, c, g, or t
  misc_feature (67)..(67): n is a, c, g, or t
  misc_feature (91)..(91): n is a, c, g, or t
  misc_feature (102)..(102): n is a, c, g, or t
  misc_feature (104)..(107): n is a, c, g, or t
  misc_feature (109)..(109): n is a, c, g, or t
  misc_feature (116)..(118): n is a, c, g, or t
  misc_feature (120)..(120): n is a, c, g, or t
  misc_feature (130)..(130): n is a, c, g, or t
  misc_feature (134)..(134): n is a, c, g, or t
  misc_feature (152)..(153): n is a, c, g, or t
  misc_feature (159)..(159): n is a, c, g, or t
  misc_feature (167)..(168): n is a, c, g, or t
  misc_feature (180)..(180): n is a, c, g, or t
  misc_feature (185)..(186): n is a, c, g, or t
  misc_feature (188)..(188): n is a, c, g, or t
  misc_feature (192)..(192): n is a, c, g, or t
  misc_feature (198)..(198): n is a, c, g, or t
  misc_feature (213)..(213): n is a, c, g, or t
  misc_feature (219)..(219): n is a, c, g, or t
  misc_feature (238)..(238): n is a, c, g, or t
  misc_feature (240)..(240): n is a, c, g, or t
  misc_feature (247)..(247): n is a, c, g, or t
  misc_feature (257)..(257): n is a, c, g, or t
  misc_feature (266)..(266): n is a, c, g, or t
  misc_feature (269)..(269): n is a, c, g, or t
  misc_feature (272)..(272): n is a, c, g, or t
  misc_feature (284)..(284): n is a, c, g, or t
  misc_feature (295)..(295): n is a, c, g, or t
  misc_feature (326)..(326): n is a, c, g, or t
  misc_feature (328)..(328): n is a, c, g, or t
  misc_feature (342)..(342): n is a, c, g, or t
  misc_feature (347)..(348): n is a, c, g, or t
  misc_feature (374)..(374): n is a, c, g, or t
  misc_feature (381)..(381): n is a, c, g, or t
  misc_feature (395)..(395): n is a, c, g, or t
  misc_feature (412)..(412): n is a, c, g, or t
  misc_feature (416)..(416): n is a, c, g, or t
  misc_feature (428)..(428): n is a, c, g, or t
  misc_feature (435)..(435): n is a, c, g, or t
  misc_feature (450)..(450): n is a, c, g, or t
  misc_feature (453)..(453): n is a, c, g, or t
  misc_feature (464)..(464): n is a, c, g, or t
  misc_feature (470)..(473): n is a, c, g, or t
  misc_feature (481)..(481): n is a, c, g, or t
  misc_feature (486)..(486): n is a, c, g, or t
  misc_feature (489)..(489): n is a, c, g, or t
  misc_feature (514)..(514): n is a, c, g, or t
  misc_feature (521)..(522): n is a, c, g, or t
  misc_feature (526)..(526): n is a, c, g, or t
  misc_feature (535)..(535): n is a, c, g, or t
  misc_feature (537)..(537): n is a, c, g, or t
  misc_feature (542)..(542): n is a, c, g, or t
  misc_feature (544)..(544): n is a, c, g, or t
  misc_feature (546)..(548): n is a, c, g, or t
  misc_feature (552)..(553): n is a, c, g, or t
  misc_feature (562)..(562): n is a, c, g, or t
  misc_feature (564)..(565): n is a, c, g, or t
  misc_feature (567)..(568): n is a, c, g, or t
  misc_feature (572)..(572): n is a, c, g, or t
  misc_feature (575)..(575): n is a, c, g, or t
  misc_feature (593)..(593): n is a, c, g, or t
  misc_feature (605)..(605): n is a, c, g, or t
  misc_feature (608)..(608): n is a, c, g, or t
  misc_feature (967)..(967): n is a, c, g, or t
  misc_feature (976)..(976): n is a, c, g, or t
  misc_feature (983)..(983): n is a, c, g, or t
  misc_feature (998)..(998): n is a, c, g, or t
  misc_feature (1014)..(1014): n is a, c, g, or t
  misc_feature (1030)..(1030): n is a, c, g, or t
aaaaaanaggtttccccnggangtccctnggggntcnttttnngancntncgttanggggncctncnccttttccccttgggggagggggntttttaaagcnannnntnggtttcnnntngggttaagtntttncccaaaagttggtttttnnaaaaancccctttnncccggacgtttnccttnncngganaatatnttttgggccaaaccngttagncgggatttcccaattgcgncncccttgnaaacgggttnccggggggngtnttnaggggttgaacngggttttaaangtgccaaaacgggtaaattggaggcattttngnaatggcttttgttnaaccnntcccttgggaaagggttgtagttttnaacgggnaaacaaaccccgtngtagcgggtgttttttntttnccaagcgccggntaagccncggaaaaaaaggatnccnggagaccttgnattttnnnnggggtttnacgcnatnttttttggaattttggggggataanaattttnnaccngaatttttngnggccncncnnngggnnaaaaatctnannannattnggntattgaacatttcttccntgcatatttatngangtatgaccctttaaacaattaagtacttggcttcagtgggagagaaagtgcttagcctcaaaaagacttgaagtgcccagggtgtgtgtgtgtgtgtgtgtgtgtgtgtgtgtatgtgtgtgtgtgtgtgtttgtgtgtgtgtaacccagaggggtgcccacttgctcaaaagagaaggggcagaggaatatgagggaaggattgtgggagggagtgaccagtagggaaacagtgagtgtgatgtaaagtgaataagtaaaaaaattaaattaaattaaaagtaaataaagtgtctacaaagtcaattactcctttcccttcctccaccctttcttctaatattaggcaaaaacaaacncaaaaacanaaacaancaaactgaaagactntaacctgtaggttggncagcttgaaagagatntttc

SEQ ID NO: 152 - DNA, 186 bp, Artificial Sequence
  Description of Artificial Sequence: Note = Synthetic Construct
  misc_feature (176)..(176): n is a, c, g, or t
agaccacctgggtggaaactcctattcttacaccaagctgcctctgtatccacagataccaagaagtagccaccgttgttttacttaactcatggtccacggggtgagctgaggtctccttcctgagcaagatggaaattttacttggtctgttaactagcgtgcattgaatggangacatatgat

SEQ ID NO: 153 - DNA, 1028 bp, Artificial Sequence
  Description of Artificial Sequence: Note = Synthetic Construct
  misc_feature (10)..(10): n is a, c, g, or t
  misc_feature (19)..(19): n is a, c, g, or t
  misc_feature (23)..(24): n is a, c, g, or t
  misc_feature (29)..(30): n is a, c, g, or t
  misc_feature (34)..(34): n is a, c, g, or t
  misc_feature (37)..(37): n is a, c, g, or t
  misc_feature (40)..(40): n is a, c, g, or t
  misc_feature (73)..(73): n is a, c, g, or t
  misc_feature (84)..(84): n is a, c, g, or t
  misc_feature (95)..(95): n is a, c, g, or t
  misc_feature (111)..(111): n is a, c, g, or t
  misc_feature (119)..(119): n is a, c, g, or t
  misc_feature (148)..(148): n is a, c, g, or t
  misc_feature (179)..(179): n is a, c, g, or t
  misc_feature (181)..(181): n is a, c, g, or t
  misc_feature (205)..(205): n is a, c, g, or t
  misc_feature (210)..(210): n is a, c, g, or t
  misc_feature (215)..(215): n is a, c, g, or t
  misc_feature (219)..(219): n is a, c, g, or t
  misc_feature (226)..(226): n is a, c, g, or t
  misc_feature (232)..(233): n is a, c, g, or t
  misc_feature (238)..(239): n is a, c, g, or t
  misc_feature (258)..(258): n is a, c, g, or t
  misc_feature (348)..(348): n is a, c, g, or t
  misc_feature (430)..(430): n is a, c, g, or t
  misc_feature (463)..(463): n is a, c, g, or t
  misc_feature (520)..(520): n is a, c, g, or t
  misc_feature (528)..(528): n is a, c, g, or t
  misc_feature (982)..(982): n is a, c, g, or t
  misc_feature (985)..(986): n is a, c, g, or t
aaagggaacnttttaagcntttnnaattnngttnccnaanaaggatttgcatttaccacccttaaatttaggnatttttgaatnatttcaacccnttgcaggcagtttgtnccatgttntgggaaagttttaacaggatggttatttngacaaaacaggttttttcagaccatttgtgnantatcttgaaatttcccagtttttnaattntattntaangatattntagttnnaattnnatgacttcaatttgtatanacaggttcttaacaaacagtgtgtaactgagtaccttgccccagcatttaaggttacacacatcatacgaacactgaagaaaatgtctgntctttaattttccccttttctctgtgtaatttccttcaggactcctttgtcctgagtggtcaggcccttgataagatggttnatcttatttctgtttgcccatgtgttgtaatcntgcctgacagttcttgcttaatgcagaaaccaagcaaaggttcagtttgtactggcntccctttntagttatctgacagggatcagttttcaagctgtagccgtggtcctcagagagacctctgcccatatacagcagcagtctttctcatcccagccctgggagttctagcaaagatttgactttctgagttgttcagggtcagagaccatgtatcaagcctcggctctatttcttgagtaaaatgggcatctggcacatctacttagatgcagaaatagtcagaatgaagtgaagatgtaggaggagtcgtgtggagaaataggctctctgaaaggaggcttcttcttcactttataagctgtagtgtcatcccttcccaagtggctctgaaactgtgttagaagacatggcctccccagagcttggggaaaccttaaataaggctgctgctcagatgtcagcacattttacgctttactggaagacttctgcttcctcttcctatttctccaaatncanntgaaagacttgtacctgtaggtttgggccagctgaaaagatc

SEQ ID NO: 154 - DNA, 1034 bp, Artificial Sequence; identical to SEQ ID NO: 151
  Description of Artificial Sequence: Note = Synthetic Construct
  misc_feature (7)..(7): n is a, c, g, or t
  misc_feature (18)..(18): n is a, c, g, or t
  misc_feature (22)..(22): n is a, c, g, or t
  misc_feature (29)..(29): n is a, c, g, or t
  misc_feature (34)..(34): n is a, c, g, or t
  misc_feature (37)..(37): n is a, c, g, or t
  misc_feature (42)..(43): n is a, c, g, or t
  misc_feature (46)..(46): n is a, c, g, or t
  misc_feature (48)..(48): n is a, c, g, or t
  misc_feature (50)..(50): n is a, c, g, or t
  misc_feature (56)..(56): n is a, c, g, or t
  misc_feature (61)..(61): n is a, c, g, or t
  misc_feature (65)..(65): n is a, c, g, or t
  misc_feature (67)..(67): n is a, c, g, or t
  misc_feature (91)..(91): n is a, c, g, or t
  misc_feature (102)..(102): n is a, c, g, or t
  misc_feature (104)..(107): n is a, c, g, or t
  misc_feature (109)..(109): n is a, c, g, or t
  misc_feature (116)..(118): n is a, c, g, or t
  misc_feature (120)..(120): n is a, c, g, or t
  misc_feature (130)..(130): n is a, c, g, or t
  misc_feature (134)..(134): n is a, c, g, or t
  misc_feature (152)..(153): n is a, c, g, or t
  misc_feature (159)..(159): n is a, c, g, or t
  misc_feature (167)..(168): n is a, c, g, or t
  misc_feature (180)..(180): n is a, c, g, or t
  misc_feature (185)..(186): n is a, c, g, or t
  misc_feature (188)..(188): n is a, c, g, or t
  misc_feature (192)..(192): n is a, c, g, or t
  misc_feature (198)..(198): n is a, c, g, or t
  misc_feature (213)..(213): n is a, c, g, or t
  misc_feature (219)..(219): n is a, c, g, or t
  misc_feature (238)..(238): n is a, c, g, or t
  misc_feature (240)..(240): n is a, c, g, or t
  misc_feature (247)..(247): n is a, c, g, or t
  misc_feature (257)..(257): n is a, c, g, or t
  misc_feature (266)..(266): n is a, c, g, or t
  misc_feature (269)..(269): n is a, c, g, or t
  misc_feature (272)..(272): n is a, c, g, or t
  misc_feature (284)..(284): n is a, c, g, or t
  misc_feature (295)..(295): n is a, c, g, or t
  misc_feature (326)..(326): n is a, c, g, or t
  misc_feature (328)..(328): n is a, c, g, or t
  misc_feature (342)..(342): n is a, c, g, or t
  misc_feature (347)..(348): n is a, c, g, or t
  misc_feature (374)..(374): n is a, c, g, or t
  misc_feature (381)..(381): n is a, c, g, or t
  misc_feature (395)..(395): n is a, c, g, or t
  misc_feature (412)..(412): n is a, c, g, or t
  misc_feature (416)..(416): n is a, c, g, or t
  misc_feature (428)..(428): n is a, c, g, or t
  misc_feature (435)..(435): n is a, c, g, or t
  misc_feature (450)..(450): n is a, c, g, or t
  misc_feature (453)..(453): n is a, c, g, or t
  misc_feature (464)..(464): n is a, c, g, or t
  misc_feature (470)..(473): n is a, c, g, or t
  misc_feature (481)..(481): n is a, c, g, or t
  misc_feature (486)..(486): n is a, c, g, or t
  misc_feature (489)..(489): n is a, c, g, or t
  misc_feature (514)..(514): n is a, c, g, or t
  misc_feature (521)..(522): n is a, c, g, or t
  misc_feature (526)..(526): n is a, c, g, or t
  misc_feature (535)..(535): n is a, c, g, or t
  misc_feature (537)..(537): n is a, c, g, or t
  misc_feature (542)..(542): n is a, c, g, or t
  misc_feature (544)..(544): n is a, c, g, or t
  misc_feature (546)..(548): n is a, c, g, or t
  misc_feature (552)..(553): n is a, c, g, or t
  misc_feature (562)..(562): n is a, c, g, or t
  misc_feature (564)..(565): n is a, c, g, or t
  misc_feature (567)..(568): n is a, c, g, or t
  misc_feature (572)..(572): n is a, c, g, or t
  misc_feature (575)..(575): n is a, c, g, or t
  misc_feature (593)..(593): n is a, c, g, or t
  misc_feature (605)..(605): n is a, c, g, or t
  misc_feature (608)..(608): n is a, c, g, or t
  misc_feature (967)..(967): n is a, c, g, or t
  misc_feature (976)..(976): n is a, c, g, or t
  misc_feature (983)..(983): n is a, c, g, or t
  misc_feature (998)..(998): n is a, c, g, or t
  misc_feature (1014)..(1014): n is a, c, g, or t
  misc_feature (1030)..(1030): n is a, c, g, or t

SEQ ID NO: 155 - DNA, 824 bp, Artificial Sequence
  Description of Artificial Sequence: Note = Synthetic Construct
  misc_feature (6)..(6): n is a, c, g, or t
  misc_feature (12)..(13): n is a, c, g, or t
  misc_feature (15)..(16): n is a, c, g, or t
  misc_feature (19)..(19): n is a, c, g, or t
  misc_feature (26)..(26): n is a, c, g, or t
  misc_feature (28)..(28): n is a, c, g, or t
  misc_feature (30)..(30): n is a, c, g, or t
  misc_feature (32)..(32): n is a, c, g, or t
  misc_feature (35)..(35): n is a, c, g, or t
  misc_feature (38)..(39): n is a, c, g, or t
  misc_feature (42)..(42): n is a, c, g, or t
  misc_feature (44)..(45): n is a, c, g, or t
  misc_feature (51)..(51): n is a, c, g, or t
  misc_feature (60)..(60): n is a, c, g, or t
  misc_feature (63)..(63): n is a, c, g, or t
  misc_feature (65)..(65): n is a, c, g, or t
  misc_feature (72)..(72): n is a, c, g, or t
  misc_feature (85)..(85): n is a, c, g, or t
  misc_feature (124)..(124): n is a, c, g, or t
  misc_feature (140)..(140): n is a, c, g, or t
  misc_feature (147)..(147): n is a, c, g, or t
  misc_feature (180)..(180): n is a, c, g, or t
  misc_feature (212)..(212): n is a, c, g, or t
  misc_feature (222)..(222): n is a, c, g, or t
  misc_feature (225)..(225): n is a, c, g, or t
  misc_feature (237)..(237): n is a, c, g, or t
  misc_feature (271)..(271): n is a, c, g, or t
  misc_feature (336)..(336): n is a, c, g, or t
  misc_feature (399)..(399): n is a, c, g, or t
gggggnttttcnnanntancaaaaantngntntancanngantnnttgagntgttgaagnaangnggaaaangttttgaaatcantgtaatgaggttccaaaaattgagcaggaaattggatgntgtcaggagaaacccnttcagtnttgtgcaattggttcgccagcagttaggaccgnttccccatcacttgtgccagcggacatccagntattgagccntgnatcatttatggnacaaattaggaacacacaacagagatccgctttntgactgccatgttcgccaaactcaattgggggaagtaatcctccagaccgttccgtttgcacgtntaggaagccacagtgaaaacacaaaattcgtggaggcgactctaaccaggaagcctaatcccntagattcccgggacactggggcaggcgtcctaaaaacagctttgtggggcttcagtcctccgtgcggttccagtccgggtcttggggatcgccctcgcggggaatgtccgggactccggtcggtatctttttggcctgggaatttccagcgtgtggaaaaagtccacaaacttagtcctcactgcccgcctcgcctcctccggcccttctcggtgcccacgcaccccccgatcgaacccgaggatgagcatagggtgtattttaggcgtgctgggcttccccgcccccctctgcccacttagctggcaagaagaaagccagcactataaaggaggccagggccaaggactggcctcctcttgctcacgaggtcagacgcgagctctgaaagacttcacctgtaggtttggcaagctgaagagatc

SEQ ID NO: 156 - DNA, 774 bp, Artificial Sequence
  Description of Artificial Sequence: Note = Synthetic Construct
  misc_feature (8)..(9): n is a, c, g, or t
  misc_feature (11)..(11): n is a, c, g, or t
  misc_feature (14)..(14): n is a, c, g, or t
  misc_feature (24)..(24): n is a, c, g, or t
  misc_feature (26)..(26): n is a, c, g, or t
  misc_feature (45)..(45): n is a, c, g, or t
  misc_feature (48)..(48): n is a, c, g, or t
  misc_feature (54)..(54): n is a, c, g, or t
  misc_feature (58)..(58): n is a, c, g, or t
  misc_feature (64)..(64): n is a, c, g, or t
  misc_feature (79)..(79): n is a, c, g, or t
  misc_feature (84)..(84): n is a, c, g, or t
  misc_feature (93)..(93): n is a, c, g, or t
  misc_feature (105)..(105): n is a, c, g, or t
  misc_feature (122)..(122): n is a, c, g, or t
  misc_feature (129)..(129): n is a, c, g, or t
  misc_feature (134)..(134): n is a, c, g, or t
  misc_feature (144)..(144): n is a, c, g, or t
  misc_feature (146)..(146): n is a, c, g, or t
  misc_feature (152)..(152): n is a, c, g, or t
  misc_feature (170)..(170): n is a, c, g, or t
  misc_feature (193)..(193): n is a, c, g, or t
  misc_feature (204)..(204): n is a, c, g, or t
  misc_feature (213)..(213): n is a, c, g, or t
  misc_feature (225)..(225): n is a, c, g, or t
  misc_feature (258)..(258): n is a, c, g, or t
  misc_feature (274)..(274): n is a, c, g, or t
  misc_feature (288)..(288): n is a, c, g, or t
  misc_feature (374)..(374): n is a, c, g, or t
  misc_feature (708)..(708): n is a, c, g, or t
  misc_feature (739)..(739): n is a, c, g, or t
  misc_feature (741)..(741): n is a, c, g, or t
  misc_feature (756)..(756): n is a, c, g, or t
  misc_feature (768)..(768): n is a, c, g, or t
gaggggannancancaggaccaancngataagggggtcaacaacntgngttccncccnttgagngggaaatgagcacgnggcantccaaccgntcaaggtcccgnttcggacggtcacacantaggttntcatntggattgccngngttccngttggcatccgggaaaantgagactgtgtcggtaccagagntaggatggccntccttcccngccccggccttnttggcgccttgcgatccttcccgaaccggcccntggcgtctccgccttnggcacttgcacatntggcggcccaggatggcgcttccgggatggcgccagcgcgcgtacgtcatcacggagcgtccatgtgttccttctgtccaagcgcntaggagcctgcgcgtactcccagcaaggaagatgtaggaccaaaatgtagaagcacttaacatgaacgtcaaaacgatgaccaatcacagggcgatatatgcgcatgcgcaatgttccaatcatggctcataagcaatccggaagtggccaattaaatatactatttactaatccagggttacacagtgaaaccctgtctcgaaaaataaacacagggctggagagatggctcactgattaagaacactgactgctcttccagaagtcttgagttcaattccgagcaagcacatggtggctcacaaccatctgtaacagattctggtttatgtngagacaactacagtgtactcgtattgaaagntncccacctgtaggttnggcaagctaaangagatc

SEQ ID NO: 157 - DNA, 248 bp, Artificial Sequence
  Description of Artificial Sequence: Note = Synthetic Construct
  misc_feature (185)..(185): n is a, c, g, or t
  misc_feature (230)..(230): n is a, c, g, or t
  misc_feature (234)..(234): n is a, c, g, or t
tgacacttcatggaaactgagaccgggagcttccaccagaaggcactgcccagtggagaaaaccgacttctttttgttgttgttctgatgttttgtttttgagataaaggtctcactgtgtagctcaggctggttttgaaatcaggatcctgaccctcaggaatgttaaagtgcctaaaagtggngacaaattattttacgtgcctttgaaagacttcacctgtaggttnggcnagctagaagagatc

SEQ ID NO: 158 - DNA, 833 bp, Artificial Sequence
  Description of Artificial Sequence: Note = Synthetic Construct
  misc_feature (3)..(3): n is a, c, g, or t
  misc_feature (12)..(13): n is a, c, g, or t
  misc_feature (20)..(20): n is a, c, g, or t
  misc_feature (23)..(23): n is a, c, g, or t
  misc_feature (29)..(29): n is a, c, g, or t
  misc_feature (41)..(41): n is a, c, g, or t
  misc_feature (53)..(53): n is a, c, g, or t
  misc_feature (56)..(59): n is a, c, g, or t
  misc_feature (65)..(65): n is a, c, g, or t
  misc_feature (72)..(72): n is a, c, g, or t
  misc_feature (86)..(86): n is a, c, g, or t
  misc_feature (107)..(107): n is a, c, g, or t
  misc_feature (112)..(112): n is a, c, g, or t
  misc_feature (114)..(114): n is a, c, g, or t
  misc_feature (122)..(122): n is a, c, g, or t
  misc_feature (126)..(127): n is a, c, g, or t
  misc_feature (134)..(134): n is a, c, g, or t
  misc_feature (145)..(145): n is a, c, g, or t
  misc_feature (149)..(149): n is a, c, g, or t
  misc_feature (155)..(155): n is a, c, g, or t
  misc_feature (161)..(161): n is a, c, g, or t
  misc_feature (207)..(207): n is a, c, g, or t
  misc_feature (237)..(237): n is a, c, g, or t
  misc_feature (260)..(260): n is a, c, g, or t
  misc_feature (280)..(280): n is a, c, g, or t
  misc_feature (282)..(282): n is a, c, g, or t
  misc_feature (284)..(284): n is a, c, g, or t
  misc_feature (287)..(287): n is a, c, g, or t
  misc_feature (301)..(301): n is a, c, g, or t
  misc_feature (328)..(328): n is a, c, g, or t
  misc_feature (484)..(484): n is a, c, g, or t
  misc_feature (768)..(768): n is a, c, g, or t
aanggggttatnntggaganatnctaagntcccaaagcaanttaggattgctnccnnnngaattnttaagcntttgcattaagtantaatgccaaaatgaccccaanatatngntccttgantgtnntaaaaangaggatcttcnttgnccatanacgccntatatgaaagcaactgaacaagatttaaaattggacaggtcacaancgggcgtgtgcctttaatcccagcactcgntggctgatagaagcagatgcatntatgtgggtttgaggacagntngnttnacgtagagagttcntatatcagtagggctttgtagagaccntatctcaaaaaacaaaagcaaaacaacagagaaaaaatcaattgaccatgtcccaattacctttatttatctgtaacctatccttagttatactcgtaatctttttctctcttcagtttgcgtacgggacagcagacctactcacaacccaagctntaaatgatgagcgtactcagccagggagcttcaccccacttaaccccataagatggcggcagcgcctcttcacccactcagggctgaagcacgcatcacgtgatgcgctccagctctcgccgcggtggctgacgggaggtggagatagaacgagggtgtcggccattttgtgtctgtttcctgccggacgtggtggtggcggttggttccgagaactgtgcgagtctcttctctctttttttttttttgtttttcgttttccccccagcttcttttcgcctctnttctgcatagtctgtagtgcgcagttgaaagattccacctgtaggttgggcaagctaaaagagat

SEQ ID NO: 159 - DNA, 880 bp, Artificial Sequence
  Description of Artificial Sequence: Note = Synthetic Construct
  misc_feature (3)..(3): n is a, c, g, or t
  misc_feature (8)..(8): n is a, c, g, or t
  misc_feature (15)..(15): n is a, c, g, or t
  misc_feature (151)..(151): n is a, c, g, or t
  misc_feature (182)..(182): n is a, c, g, or t
  misc_feature (194)..(194): n is a, c, g, or t
  misc_feature (196)..(196): n is a, c, g, or t
  misc_feature (229)..(229): n is a, c, g, or t
  misc_feature (253)..(253): n is a, c, g, or t
  misc_feature (324)..(324): n is a, c, g, or t
  misc_feature (348)..(348): n is a, c, g, or t
  misc_feature (467)..(467): n is a, c, g, or t
  misc_feature (818)..(819): n is a, c, g, or t
  misc_feature (822)..(822): n is a, c, g, or t
  misc_feature (834)..(835): n is a, c, g, or t
  misc_feature (849)..(850): n is a, c, g, or t
  misc_feature (865)..(865): n is a, c, g, or t
aanatggnttggttntaaaggttaaaattggggcaaaatttttccgcccgggtccttaaaccggattaactccaaggccaaaattccgagggggaatcaacaacaaggacccaaccggattaaggcgggttcaaacaaacttggatttccngccctttggggcgggggaaatgggcacgggngcattccaagcngntcaaggttccggcttgcggacggttaacacaantaggtttctcatctagattggccngcgttgcggttgagcatccgggaaaattgagattgtgtcggtaccagaggtaggatgggccttccttcccngccccggcttcctggcgccttgcnatccttcccgaaccggcccttgggtctccggccttgggcacttgcacatctggcggccaggatgcgcttccgggatggcgccagcgcgcgtacgtcatcacggagcgtccatgtgttcnttctgtccaagcgcttaggagcctgcgcgtactcccagcaaggaagatgtaggaccaaaatgtagaagcacttaacatgaacgtcaaaacgatgaccaatcacagggcgatatatgcgcatgcgcaatgttccaatcatggctcataagcaatccggaagtggccaattaaatatactatttactaatccagggttacacagtgaaaccctgtctcgaaaaataaacacagggctggagagatggctcactgattaagaacactgactgctcttccagaagtcttgagttcaattccgagcaagcacatggtggctcacaaccatctgtaacagattctggtttatctggnntcnactacagtgtannggcattgaaagatnntacctgtaggttggncagctaaaaaggatc

SEQ ID NO: 160 - DNA, 864 bp, Artificial Sequence
  Description of Artificial Sequence: Note = Synthetic Construct
  misc_feature (9)..(9): n is a, c, g, or t
  misc_feature (17)..(17): n is a, c, g, or t
  misc_feature (22)..(22): n is a, c, g, or t
  misc_feature (29)..(29): n is a, c, g, or t
  misc_feature (43)..(43): n is a, c, g, or t
  misc_feature (79)..(79): n is a, c, g, or t
  misc_feature (84)..(84): n is a, c, g, or t
  misc_feature (120)..(120): n is a, c, g, or t
  misc_feature (127)..(127): n is a, c, g, or t
  misc_feature (134)..(134): n is a, c, g, or t
  misc_feature (136)..(136): n is a, c, g, or t
  misc_feature (162)..(162): n is a, c, g, or t
  misc_feature (173)..(173): n is a, c, g, or t
  misc_feature (180)..(180): n is a, c, g, or t
  misc_feature (182)..(182): n is a, c, g, or t
  misc_feature (210)..(210): n is a, c, g, or t
  misc_feature (216)..(216): n is a, c, g, or t
  misc_feature (233)..(233): n is a, c, g, or t
  misc_feature (238)..(238): n is a, c, g, or t
  misc_feature (256)..(256): n is a, c, g, or t
  misc_feature (322)..(322): n is a, c, g, or t
  misc_feature (340)..(340): n is a, c, g, or t
  misc_feature (371)..(371): n is a, c, g, or t
  misc_feature (373)..(373): n is a, c, g, or t
  misc_feature (484)..(484): n is a, c, g, or t
  misc_feature (834)..(834): n is a, c, g, or t
  misc_feature (849)..(849): n is a, c, g, or t
aattttaanttgttggnataanggcttgnccatatccttcctnttgtttgccctaagtaacagccaattgggggagaanttttntgtcagtatcatatttttcgttagggaacggaggcncaggaantgatccntntgggttacagtcattttagcataggntgacagttggngaccaantnatcttgccgtgttggaaggagaggggantaaggntgaagctcttgagtccnttgangcccttggaatcgggaantcccttaaaccaaccccttttgccgttgaattgcaccaaccagattcttccagtctgcttgaggangacaggacttcattgctntggagaggggcaggagggttgggagttgacntnacagggctcagggattcttttagaagggtccaggttcatggcttcccccccccccagccaggtcagacactaaagtgtcttaagcccctccatacttgccgctcccccacnttggatgaagccggccattaggcagggaccgtctctgggagaggccaagccctctggctcacttgtggatttcctttaagcaagacttcctctctgcttccaggactcctgtcaaacaagagggtccctggcttagagtttgggagctgcaggcagaacagacattccccgatgactcacaagcctggaactctgtgggccagcaggaatggggatggctttctggtcagtcagggtcaactgggacactcactctgagacagggaggcaagggagaaacaggtcagaggtagagagagctcagtcccagggactcacgttgaggtccctaaggtgcgctagggagaggnttttacattcggttnggcaagctaaaagag

SEQ ID NO: 161 - DNA, 874 bp, Artificial Sequence
  Description of Artificial Sequence: Note = Synthetic Construct
  misc_feature (20)..(20): n is a, c, g, or t
  misc_feature (25)..(25): n is a, c, g, or t
  misc_feature (33)..(34): n is a, c, g, or t
  misc_feature (135)..(135): n is a, c, g, or t
  misc_feature (154)..(154): n is a, c, g, or t
  misc_feature (164)..(164): n is a, c, g, or t
  misc_feature (182)..(182): n is a, c, g, or t
  misc_feature (187)..(187): n is a, c, g, or t
  misc_feature (197)..(197): n is a, c, g, or t
  misc_feature (217)..(217): n is a, c, g, or t
  misc_feature (219)..(219): n is a, c, g, or t
  misc_feature (221)..(221): n is a, c, g, or t
  misc_feature (223)..(223): n is a, c, g, or t
  misc_feature (229)..(229): n is a, c, g, or t
  misc_feature (283)..(283): n is a, c, g, or t
  misc_feature (293)..(293): n is a, c, g, or t
  misc_feature (327)..(327): n is a, c, g, or t
  misc_feature (348)..(348): n is a, c, g, or t
  misc_feature (367)..(367): n is a, c, g, or t
  misc_feature (409)..(409): n is a, c, g, or t
  misc_feature (418)..(418): n is a, c, g, or t
  misc_feature (422)..(422): n is a, c, g, or t
  misc_feature (439)..(439): n is a, c, g, or t
  misc_feature (465)..(465): n is a, c, g, or t
  misc_feature (493)..(493): n is a, c, g, or t
  misc_feature (528)..(528): n is a, c, g, or t
  misc_feature (839)..(839): n is a, c, g, or t
  misc_feature (841)..(841): n is a, c, g, or t
  misc_feature (859)..(859): n is a, c, g, or t
gaggttggaccacaaggagnttggnggaaaatnnaaaagtcaacctatcagggtgtcttttagtttggaacagaggcttgggcagaaatatgggcaagtattaggaaagtacaaggggaaatgttgtcaacgcgnttgttttcccagttgttgnactgatcccnccaggatgttttcccacntatgntatggaaccntctctttcaggaagccattntnancntatggnttgcaacccctttggggtcgcaacagcaggtattaacattaggattcataacgntagcaaaatnacagttatggagtagcaatgaaataactctatgnttgggagggtcaccacaacangagggacggtatcacaggnttttagcattaggaaggttgaggaccttatttcagagtgtcntgacaatcnttcntgggaccacttgacttnatctggagccctttccctcacgctcntactccttaccatctctgcacagctctntgaggcttagagcggtctttcttcatagctttccnttttccttcaggtatgcagtcacatcttgctttagaccccagggacattccgtgtctgactcactgcacaaaatagtttcccacatatgagtcctcaaccgccccacatcacgagacggacaagaccggagacgccatacattctgtatttgccctccttcctcatttaaataggaatttgttgctgtttaatttttcattatttgtgtgtgtgtgtgtgtgtgtgtgtgtgtgtgtgtgtgtgtgtgtgtgtgcgcgcgcacgttaatatgccgctcagaatagtctaaaactgctgggcttgaaagacntncacctgtaggtttgggcnagctaaaagagtatc

SEQ ID NO: 162 - DNA, 886 bp, Artificial Sequence
  Description of Artificial Sequence: Note = Synthetic Construct
  misc_feature (7)..(7): n is a, c, g, or t
  misc_feature (47)..(47): n is a, c, g, or t
  misc_feature (57)..(57): n is a, c, g, or t
  misc_feature (78)..(78): n is a, c, g, or t
  misc_feature (105)..(105): n is a, c, g, or t
  misc_feature (190)..(190): n is a, c, g, or t
  misc_feature (287)..(287): n is a, c, g, or t
  misc_feature (356)..(356): n is a, c, g, or t
  misc_feature (363)..(363): n is a, c, g, or t
  misc_feature (639)..(639): n is a, c, g, or t
  misc_feature (838)..(838): n is a, c, g, or t
atttttnaattgcagcaatcctcctgccttttttcttggttgttaantcacaggatntttgcacacttgaggttgaanttgcagcaatcctcctgcttttgtttnttgggcgcttggattatagtatgtgcataacacttgagcagtaactgttttcttcaatctcatttatctcagaagttccccttgntgattcagacgttattaattaggcaaaccaatgttgattgtcattacccatgagttgcttggcttgtgagatgcatactgtgtgttcgtgaggcacntactgtgaggcatgtgcccgtgaggttcatggctgtgaggtgtgtgcccgtgaggttcatggctttctngaccacngggagtatgaaggagaggaatcctacgtttgatgccagccagggttatacagcaagatcccgtctcaaaacaaaatgaagaagtagagagattagtgttaataagcaactgaggccttgaagggctgaggtcaggcggtgccctggtgcacacacagaagcgtgccagtgacgtcagacagactcagccctgtgtcagacaggccggagggtgactggccatgtggcgtgattggacacattcccaaaaaaggaactcgatggaagaggctcctcntgctccagacagggcggtggttatgtgacttgtgcgagattagtctcataccctattgctagcctgtgcctggtaccacggacatggtacaatccagggaggagccgtaagcactacaggggagccatcctgaatcccagcaagtccaacttctgttttttcttccttccccgcaacattaggaatgacttctaagagngctgttgaaagactttcacctgtaggttgggcaagcttaaaagaggat

SEQ ID NO: 163 - DNA, 865 bp, Artificial Sequence
  Description of Artificial Sequence: Note = Synthetic Construct
  misc_feature (20)..(20): n is a, c, g, or t
  misc_feature (55)..(55): n is a, c, g, or t
  misc_feature (59)..(59): n is a, c, g, or t
  misc_feature (79)..(80): n is a, c, g, or t
  misc_feature (90)..(90): n is a, c, g, or t
  misc_feature (106)..(106): n is a, c, g, or t
  misc_feature (108)..(108): n is a, c, g, or t
  misc_feature (127)..(127): n is a, c, g, or t
  misc_feature (179)..(179): n is a, c, g, or t
  misc_feature (212)..(212): n is a, c, g, or t
  misc_feature (241)..(241): n is a, c, g, or t
  misc_feature (259)..(259): n is a, c, g, or t
  misc_feature (262)..(262): n is a, c, g, or t
  misc_feature (271)..(271): n is a, c, g, or t
  misc_feature (365)..(365): n is a, c, g, or t
  misc_feature (464)..(464): n is a, c, g, or t
  misc_feature (528)..(528): n is a, c, g, or t
  misc_feature (833)..(833): n is a, c, g, or t
  misc_feature (850)..(850): n is a, c, g, or t
tggaggtaaaagtcacaagnttttcaagggtttgagatgacagttcaacgtgagnattngacaaggattgattcttgtnnacaggaaagntccccatcccaccaananacaccgtgttcaggcccantgctcagagctccgggcgccagcgaagggcaaacggccactgattggaaagntgcagtttaaagacatgtcccaggaactggtanccttgtgtgactggacttagccttgcaantctgtctgaagcataacntgntgctgtctntgggcgagcatttatgtgccccacttgagacccatctcaggacacgcaggacacggtccagtggagctttccctccagagagaggtgttagggnccatcagtgagcttccaaggacaggggaccagaacggtgaaaacaaaccagggctgtgaaggagagcagggcggggggggggggagggggggcgctctntagaatagattgaacctgcagagctgcttgctacctgaagttgtcacccttttacccacccacntcatctgtctctgcttgaccatctcagcaagtgtcacctcgctgccaggacacaagtttcctaaagcttatttcagtgtcagccgctggggagacacattcagggcatgggcgtcccccagccctcggggagaatgtgggaggtggcgatgtgggagggattcgagagaagagaatgcttaagaaccatccagggaacctgtgcgtttgaaggtctgagttacacacaggctgctcaggaaggagctagagctccaaataggagctgtgatcaggctgtgtgtgtgtgcctggtgaaagactttnacctgtaggtttgggcnagcttgaaaagtatc

SEQ ID NO: 164 - DNA, 859 bp, Artificial Sequence
  Description of Artificial Sequence: Note = Synthetic Construct
  misc_feature (3)..(3): n is a, c, g, or t
  misc_feature (9)..(9): n is a, c, g, or t
  misc_feature (11)..(11): n is a, c, g, or t
  misc_feature (16)..(16): n is a, c, g, or t
  misc_feature (26)..(26): n is a, c, g, or t
  misc_feature (39)..(39): n is a, c, g, or t
  misc_feature (58)..(58): n is a, c, g, or t
  misc_feature (79)..(79): n is a, c, g, or t
  misc_feature (85)..(85): n is a, c, g, or t
  misc_feature (90)..(90): n is a, c, g, or t
  misc_feature (94)..(94): n is a, c, g, or t
  misc_feature (144)..(144): n is a, c, g, or t
  misc_feature (146)..(147): n is a, c, g, or t
  misc_feature (157)..(157): n is a, c, g, or t
  misc_feature (178)..(178): n is a, c, g, or t
  misc_feature (215)..(215): n is a, c, g, or t
  misc_feature (248)..(248): n is a, c, g, or t
  misc_feature (263)..(263): n is a, c, g, or t
  misc_feature (281)..(281): n is a, c, g, or t
  misc_feature (295)..(295): n is a, c, g, or t
  misc_feature (422)..(422): n is a, c, g, or t
  misc_feature (568)..(568): n is a, c, g, or t
  misc_feature (726)..(726): n is a, c, g, or t
  misc_feature (798)..(799): n is a, c, g, or t
  misc_feature (815)..(815): n is a, c, g, or t
  misc_feature (819)..(819): n is a, c, g, or t
  misc_feature (829)..(830): n is a, c, g, or t
  misc_feature (834)..(834): n is a, c, g, or t
  misc_feature (840)..(840): n is a, c, g, or t
  misc_feature (842)..(842): n is a, c, g, or t
  misc_feature (848)..(848): n is a, c, g, or t
cangagcantntgaancaggcatttntggaagggctccngagaaaacacgtggaattncttgtctctgggactttagtnccagcnaggangatncagtgagggaacacaccgggcttttgttgtgcacgggaggccaggctcancnnccttgggagnttgacatccagcaggctatanacagtgatccaggggacatgtacacatggggaactgnccaggcagagaaagacaagagaaaatctcaaangatgaagacagagangagtaatatggccagaangatacagtgcctcntgcataacccttgagtttaatttccagggtcaactgtattttgaaagtataaatgaaagttcctgaagtaataaatttataggatgttagtatcacactgttcagaatagctcaaaaaatcctgccntgtcctcttaagtatgtgaatcatcttttactgcaacgtgtccacaatgtatatactacatacccaaaagtcctcactgttatcccaattagtaggctggctgccaatagttgtccatacagagtgcctgctgctgtggccatccntactgtagtaaacagtcatccaaagctcaggagtgaggctattgtagaaatgcacttcctgggggccctactgtcagtgagcacctgagagagaaagggacacaggcccaaggtgggaggccttagataaaggcccatcatgctcaggaaaggatttntacagatctcttagggaagttacaatcaaattcatacctcacagcagagctcaggagaagaatccataaagnntgaagacatgcttgtngtgnctgaaggacnntacntgtagntngggccngctgaaatttt

SEQ ID NO: 165 - DNA, 1021 bp, Artificial Sequence
  Description of Artificial Sequence: Note = Synthetic Construct
  misc_feature (5)..(5): n is a, c, g, or t
  misc_feature (7)..(7): n is a, c, g, or t
  misc_feature (25)..(25): n is a, c, g, or t
  misc_feature (33)..(33): n is a, c, g, or t
  misc_feature (45)..(45): n is a, c, g, or t
  misc_feature (48)..(48): n is a, c, g, or t
  misc_feature (57)..(57): n is a, c, g, or t
  misc_feature (62)..(62): n is a, c, g, or t
  misc_feature (68)..(68): n is a, c, g, or t
  misc_feature (71)..(71): n is a, c, g, or t
  misc_feature (85)..(85): n is a, c, g, or t
  misc_feature (91)..(91): n is a, c, g, or t
  misc_feature (99)..(99): n is a, c, g, or t
  misc_feature (116)..(116): n is a, c, g, or t
  misc_feature (119)..(119): n is a, c, g, or t
  misc_feature (131)..(131): n is a, c, g, or t
  misc_feature (146)..(146): n is a, c, g, or t
  misc_feature (149)..(149): n is a, c, g, or t
  misc_feature (152)..(152): n is a, c, g, or t
  misc_feature (180)..(180): n is a, c, g, or t
  misc_feature (200)..(200): n is a, c, g, or t
  misc_feature (207)..(207): n is a, c, g, or t
  misc_feature (217)..(217): n is a, c, g, or t
  misc_feature (220)..(220): n is a, c, g, or t
  misc_feature (232)..(232): n is a, c, g, or t
  misc_feature (235)..(235): n is a, c, g, or t
  misc_feature (247)..(247): n is a, c, g, or t
  misc_feature (256)..(256): n is a, c, g, or t
  misc_feature (276)..(276): n is a, c, g, or t
  misc_feature (286)..(286): n is a, c, g, or t
  misc_feature (298)..(298): n is a, c, g, or t
  misc_feature (320)..(320): n is a, c, g, or t
  misc_feature (324)..(324): n is a, c, g, or t
  misc_feature (333)..(333): n is a, c, g, or t
  misc_feature (336)..(336): n is a, c, g, or t
  misc_feature (411)..(411): n is a, c, g, or t
  misc_feature (415)..(415): n is a, c, g, or t
  misc_feature (417)..(417): n is a, c, g, or t
  misc_feature (474)..(474): n is a, c, g, or t
  misc_feature (915)..(915): n is a, c, g, or t
  misc_feature (961)..(961): n is a, c, g, or t
  misc_feature (1008)..(1008): n is a, c, g, or t
caatngncaaaggtttggaacccgngaaatttnaaaagtttgcgngantggttgacnttccnggtgtnaanggtttccccgttcngattgnagggatcncttttatcccttttttnagnttttttttgagnggaattttgggttcnaantgngttacccttaagtaaccccattttgcanggcatggaaaatacctaaantgggatngaaagttcanatngaggtcaggaanggntggaacagggtngaccggttngaccgttggacctttgaganccatcagatntttcccaggttnccccaaggacttgaaatgaccntgtnccttatttnaantacccaatcagttggtttctcgcttctgttcgcgcgtttttgttcccggagttcaataaaggagcccacaacccntcantngggcgccagtcctccgattgactgagtcgcccgggtacccgtgtatccaataaaccntcttgcagttgcatccgacttgtggtcttcgctgttccttgggagggtctcctctgagtgattgactacccgtcagcgggggtctttcaaactgcagttctcaagtaagctcaaccatccgagggtcattctcaaagccaagtcaaacttgggagccctcactcctggtggtctttcaaaagaccgtgcattggatagtcagagactctgcaggagcggattaagtccaggcctgtctccctgctttctgcctgggttctaaagtcaagaaggccagatggctcagatagttgagacagtggcttagctgattctctggggatgcatttggtctgcccaggaaaccctggagagttttctacccaagatactaaagttcaaacggcagcgcctgtcggcagactcagcctatacaaagctggcctgtatctgatgggattntaagtccctgggcagacccgggtttgtgggcctgaagcttgagttncaggagacttagtgggccatgggattcttttaggatcccgatatggncaaacttaaactg

SEQ ID NO: 166 - DNA, 1013 bp, Artificial Sequence
  Description of Artificial Sequence: Note = Synthetic Construct
  misc_feature (15)..(15): n is a, c, g, or t
  misc_feature (21)..(21): n is a, c, g, or t
  misc_feature (27)..(27): n is a, c, g, or t
  misc_feature (29)..(29): n is a, c, g, or t
  misc_feature (34)..(35): n is a, c, g, or t
  misc_feature (46)..(46): n is a, c, g, or t
  misc_feature (48)..(48): n is a, c, g, or t
  misc_feature (57)..(58): n is a, c, g, or t
  misc_feature (69)..(69): n is a, c, g, or t
  misc_feature (78)..(78): n is a, c, g, or t
  misc_feature (82)..(82): n is a, c, g, or t
  misc_feature (90)..(90): n is a, c, g, or t
  misc_feature (97)..(97): n is a, c, g, or t
  misc_feature (99)..(100): n is a, c, g, or t
  misc_feature (109)..(109): n is a, c, g, or t
  misc_feature (111)..(111): n is a, c, g, or t
  misc_feature (114)..(114): n is a, c, g, or t
  misc_feature (117)..(117): n is a, c, g, or t
  misc_feature (134)..(134): n is a, c, g, or t
  misc_feature (147)..(147): n is a, c, g, or t
  misc_feature (151)..(151): n is a, c, g, or t
  misc_feature (153)..(154): n is a, c, g, or t
  misc_feature (162)..(162): n is a, c, g, or t
  misc_feature (172)..(173): n is a, c, g, or t
  misc_feature (175)..(175): n is a, c, g, or t
  misc_feature (178)..(178): n is a, c, g, or t
  misc_feature (180)..(180): n is a, c, g, or t
  misc_feature (184)..(184): n is a, c, g, or t
  misc_feature (190)..(190): n is a, c, g, or t
  misc_feature (194)..(195): n is a, c, g, or t
  misc_feature (203)..(203): n is a, c, g, or t
  misc_feature (205)..(205): n is a, c, g, or t
  misc_feature (207)..(207): n is a, c, g, or t
  misc_feature (211)..(212): n is a, c, g, or t
  misc_feature (215)..(216): n is a, c, g, or t
  misc_feature (218)..(220): n is a, c, g, or t
  misc_feature (223)..(223): n is a, c, g, or t
  misc_feature (226)..(226): n is a, c, g, or t
  misc_feature (237)..(237): n is a, c, g, or t
  misc_feature (241)..(242): n is a, c, g, or t
  misc_feature (252)..(252): n is a, c, g, or t
  misc_feature (254)..(254): n is a, c, g, or t
  misc_feature (261)..(261): n is a, c, g, or t
  misc_feature (263)..(263): n is a, c, g, or t
  misc_feature (271)..(272): n is a, c, g, or t
  misc_feature (274)..(274): n is a, c, g, or t
  misc_feature (280)..(280): n is a, c, g, or t
  misc_feature (283)..(283): n is a, c, g, or t
  misc_feature (286)..(286): n is a, c, g, or t
  misc_feature (294)..(294): n is a, c, g, or t
  misc_feature (296)..(296): n is a, c, g, or t
  misc_feature (307)..(307): n is a, c, g, or t
  misc_feature (310)..(310): n is a, c, g, or t
  misc_feature (320)..(320): n is a, c, g, or t
  misc_feature (326)..(326): n is a, c, g, or t
  misc_feature (332)..(333): n is a, c, g, or t
  misc_feature (337)..(337): n is a, c, g, or t
  misc_feature (348)..(348): n is a, c, g, or t
  misc_feature (353)..(353): n is a, c, g, or t
  misc_feature (355)..(355): n is a, c, g, or t
  misc_feature (359)..(360): n is a, c, g, or t
  misc_feature (362)..(362): n is a, c, g, or t
  misc_feature (365)..(365): n is a, c, g, or t
  misc_feature (367)..(367): n is a, c, g, or t
  misc_feature (372)..(372): n is a, c, g, or t
  misc_feature (375)..(375): n is a, c, g, or t
  misc_feature (380)..(380): n is a, c, g, or t
  misc_feature (382)..(383): n is a, c, g, or t
  misc_feature (386)..(387): n is a, c, g, or t
  misc_feature (391)..(391): n is a, c, g, or t
  misc_feature (399)..(399): n is a, c, g, or t
  misc_feature (407)..(407): n is a, c, g, or t
  misc_feature (411)..(412): n is a, c, g, or t
  misc_feature (416)..(416): n is a, c, g, or t
  misc_feature (419)..(419): n is a, c, g, or t
  misc_feature (425)..(425): n is a, c, g, or t
  misc_feature (428)..(428): n is a, c, g, or t
  misc_feature (433)..(434): n is a, c, g, or t
  misc_feature (440)..(440): n is a, c, g, or t
  misc_feature (442)..(442): n is a, c, g, or t
  misc_feature (466)..(466): n is a, c, g, or t
  misc_feature (472)..(473): n is a, c, g, or t
  misc_feature (479)..(479): n is a, c, g, or t
  misc_feature (484)..(484): n is a, c, g, or t
  misc_feature (494)..(494): n is a, c, g, or t
  misc_feature (496)..(496): n is a, c, g, or t
  misc_feature (498)..(498): n is a, c, g, or t
  misc_feature (504)..(504): n is a, c, g, or t
  misc_feature (507)..(507): n is a, c, g, or t
  misc_feature (511)..(511): n is a, c, g, or t
  misc_feature (521)..(521): n is a, c, g, or t
  misc_feature (528)..(528): n is a, c, g, or t
  misc_feature (533)..(533): n is a, c, g, or t
  misc_feature (537)..(538): n is a, c, g, or t
  misc_feature (540)..(540): n is a, c, g, or t
  misc_feature (555)..(555): n is a, c, g, or t
  misc_feature (559)..(559): n is a, c, g, or t
  misc_feature (562)..(563): n is a, c, g, or t
  misc_feature (567)..(567): n is a, c, g, or t
  misc_feature (574)..(574): n is a, c, g, or t
  misc_feature (578)..(579): n is a, c, g, or t
  misc_feature (605)..(605): n is a, c, g, or t
  misc_feature (611)..(611): n is a, c, g, or t
  misc_feature (622)..(623): n is a, c, g, or t
  misc_feature (628)..(628): n is a, c, g, or t
  misc_feature (630)..(630): n is a, c, g, or t
  misc_feature (635)..(636): n is a, c, g, or t
  misc_feature (641)..(641): n is a, c, g, or t
  misc_feature (645)..(645): n is a, c, g, or t
  misc_feature (648)..(648): n is a, c, g, or t
  misc_feature (660)..(660): n is a, c, g, or t
  misc_feature (669)..(669): n is a, c, g, or t
  misc_feature (673)..(673): n is a, c, g, or t
  misc_feature (678)..(678): n is a, c, g, or t
  misc_feature (681)..(681): n is a, c, g, or t
  misc_feature (690)..(690): n is a, c, g, or t
  misc_feature (692)..(692): n is a, c, g, or t
  misc_feature (694)..(694): n is a, c, g, or t
  misc_feature (700)..(700): n is a, c, g, or t
  misc_feature (704)..(704): n is a, c, g, or t
  misc_feature (706)..(706): n is a, c, g, or t
  misc_feature (708)..(708): n is a, c, g, or t
  misc_feature (721)..(721): n is a, c, g, or t
  misc_feature (734)..(734): n is a, c, g, or t
  misc_feature (739)..(739): n is a, c, g, or t
  misc_feature (741)..(741): n is a, c, g, or t
  misc_feature (750)..(750): n is a, c, g, or t
  misc_feature (756)..(757): n is a, c, g, or t
  misc_feature (780)..(780): n is a, c, g, or t
  misc_feature (784)..(784): n is a, c, g, or t
  misc_feature (789)..(789): n is a, c, g, or t
  misc_feature (804)..(804): n is a, c, g, or t
  misc_feature (808)..(808): n is a, c, g, or t
  misc_feature (812)..(812): n is a, c, g, or t
  misc_feature (818)..(818): n is a, c, g, or t
  misc_feature (822)..(822): n is a, c, g, or t
  misc_feature (824)..(824): n is a, c, g, or t
  misc_feature (839)..(839): n is a, c, g, or t
  misc_feature (842)..(842): n is a, c, g, or t
  misc_feature (844)..(844): n is a, c, g, or t
  misc_feature (856)..(857): n is a, c, g, or t
  misc_feature (859)..(859): n is a, c, g, or t
  misc_feature (862)..(862): n is a, c, g, or t
  misc_feature (874)..(874): n is a, c, g, or t
  misc_feature (877)..(877): n is a, c, g, or t
  misc_feature (893)..(893): n is a, c, g, or t
  misc_feature (897)..(897): n is a, c, g, or t
  misc_feature (909)..(909): n is a, c, g, or t
  misc_feature (916)..(916): n is a, c, g, or t
  misc_feature (924)..(924): n is a, c, g, or t
  misc_feature (933)..(933): n is a, c, g, or t
  misc_feature (935)..(935): n is a, c, g, or t
  misc_feature (940)..(940): n is a, c, g, or t
  misc_feature (942)..(942): n is a, c, g, or t
  misc_feature (953)..(953): n is a, c, g, or t
  misc_feature (959)..(959): n is a, c, g, or t
  misc_feature (964)..(964): n is a, c, g, or t
  misc_feature (966)..(966): n is a, c, g, or t
  misc_feature (982)..(982): n is a, c, g, or t
  misc_feature (993)..(993): n is a, c, g, or t
  misc_feature (997)..(997): n is a, c, g, or t
  misc_feature (1006)..(1006): n is a, c, g, or t
  misc_feature (1009)..(1010): n is a, c, g, or t
ttttgagttttctcngcccgnttgtgncngaaanncagcgggggtntntcactgtgnntctcacatgtnctcacacanatcngggggacnctcacancnncatctcacntntgnganctcacactcgtgtgggntctttcaaaacantgtncnntggatacncagacactcnncnagngnggtntatctncacnngtgtctcngngntttnngcnngnnntcnaanctcaaaagcgncatnnggcacatatntntgacacngnggtatatnngnctctcnggnganacatttgntncgcacaaaaanccntggagatttntctacncaatannctanttttcacaggngagcncntgtnnanacncncaccntanacaantnnggnntgtntcagaggngattttanctcnntggncanacccgnttntgtgnnccaaantnttgttttccaagacatatagtggnacatgnnactctncgatntccgatgagnananatgtgntcngacntttacagcgnatacacngtggngcanntntcacagatatgtgtntatntcnnacanacaaatntgcnngactcctctcgtgtataaatcaatanacgggngggttaacatnnggccncngttgnncagtnatancgngaaacacactcncaagggctncaanttttncanctatacacncncncccgangggncngngcacaaatgtgcnccgaaattttatncgccncnaacactctnaaattnntcccgggaccctagatatatttntccncattnaaaatttgcacattntttnccanttgcangggnantcgggggttcacccnccncnttgggaaggggnntnttnaacccgggttcnaanttataggggggtttanatcnccccattttttnaaaaagngtttaccntgggccccntnttttncnaaaaaatttgnccccgntttancnccggggttggggaacncgaatttcttngggngcccccctnagnnttt

SEQ ID NO: 167 - DNA, 1002 bp, Artificial Sequence
  Description of Artificial Sequence: Note = Synthetic Construct
  misc_feature (4)..(4): n is a, c, g, or t
  misc_feature (6)..(6): n is a, c, g, or t
  misc_feature (9)..(9): n is a, c, g, or t
  misc_feature (55)..(55): n is a, c, g, or t
  misc_feature (68)..(68): n is a, c, g, or t
  misc_feature (95)..(95): n is a, c, g, or t
  misc_feature (102)..(102): n is a, c, g, or t
  misc_feature (138)..(138): n is a, c, g, or t
  misc_feature (177)..(177): n is a, c, g, or t
  misc_feature (196)..(196): n is a, c, g, or t
  misc_feature (199)..(199): n is a, c, g, or t
  misc_feature (214)..(214): n is a, c, g, or t
  misc_feature (220)..(220): n is a, c, g, or t
  misc_feature (230)..(230): n is a, c, g, or t
  misc_feature (235)..(235): n is a, c, g, or t
  misc_feature (441)..(441): n is a, c, g, or t
  misc_feature (930)..(930): n is a, c, g, or t
  misc_feature (968)..(968): n is a, c, g, or t
  misc_feature (987)..(987): n is a, c, g, or t
aaananttnacacggattccttttcctcaaaaccaatgggggaataaatgatgtngtagggttccccngtaatggatactaggttgaacttccanggggaantattatttcaataaggttttagaggtcccacttgtnatcaggttattctgttgctttgggtcaagcaaacagccnatcaggattgtgattattngantaacccatttacctnacagcngggaggaaanccaangggaggcttgaggaaacggcttgtgggttcataaactctttgaatcataccttgggtgattcaaatgctttttactaggctctcctttcatagtacctctcttgtggacaaggacccagtcctttgaaaagcattgaaaactcaaaccataccactatcagtttcagctttaatataaattagctttctaagttcagctgaccacnttttcactggaccttcactgatctcacagggaagatatattttcaacaattacaaagacatttctgggttggactatgcattcctttgggccagattctacatcctttttttatgccagaattttttagcgttcctgtaagattgtcagtttcccctaggaaatccataaagctttaaatgccttctaaatagccaatattttaatgagaaatgtagtcactgatatctctttgtatttaaaggttattttgaggggagttgcttggttggttggttggttggttggttggttggttagttggttggttttggctttggttttctgtcccatggtaatatgatacttatgtcatagattagttaactcaaatggtcttttcaggtggcagtctggaaaacaactaacttggggggaaaaaggctgctccatgttctataaaagctgtacatgtgattttctctgctttaccttttatactcatttattntgttatttgtgtatgaaagccttccgtatgaaagaccnttacctgtaggtttggggngctagaaaagatctc

SEQ ID NO: 168 - DNA, 1031 bp, Artificial Sequence
  Description of Artificial Sequence: Note = Synthetic Construct
  misc_feature (5)..(6): n is a, c, g, or t
  misc_feature (11)..(11): n is a, c, g, or t
  misc_feature (24)..(24): n is a, c, g, or t
  misc_feature (47)..(47): n is a, c, g, or t
  misc_feature (54)..(54): n is a, c, g, or t
  misc_feature (64)..(64): n is a, c, g, or t
  misc_feature (75)..(76): n is a, c, g, or t
  misc_feature (85)..(85): n is a, c, g, or t
  misc_feature (98)..(98): n is a, c, g, or t
  misc_feature (168)..(168): n is a, c, g, or t
  misc_feature (190)..(190): n is a, c, g, or t
  misc_feature (194)..(194): n is a, c, g, or t
  misc_feature (257)..(257): n is a, c, g, or t
  misc_feature (978)..(978): n is a, c, g, or t
  misc_feature (991)..(991): n is a, c, g, or t
  misc_feature (1010)..(1010): n is a, c, g, or t
  misc_feature (1020)..(1020): n is a, c, g, or t
  misc_feature (1025)..(1027): n is a, c, g, or t
caacnnccatnttttggaatttgnggggtaaaatttaaaccgattcnttttccncaaacccaantgggggatatnnatgtatgtngtagggtcccccngtaatggaatatttaggttgaacttacaagggaaatattattttcacaatggtttagaggttccactgtnacaagtattctgttgctttggnccangtcaaacagcccatcaggatggtgatattagaattaaccatttatccaacagccaggagaaanccaaagggagcttgagaaacggctgtgggttcataaaactctttgaatcataccttggtgattcaaatgctttttattaggctctccttcatagtacctctcttgtggacaaagaccccagtcctttgaaagcattgaaactcaaaccataccactatcagtttcagctttaatataaattagctttctaagttcagctgaccaccttttcactggaccttcactgatctcacagggaagatatattttcaacaattacaaagacatttctgggttggactatgcattcctttgggccagattctacatcctttttttatgccagaattttttagcgttcctgtaagattgtcagtttcccctaggaaatccataaagctttaaatgccttctaaatagccaatattttaatgagaaatgtagtcactgatatctctttgtatttaaaggttattttgaggggagttgcttggttggttggttggttggttggttggttggttagttggttggttttggctttggttttctgtcccatggtaatatgatacttatgtcatagattagttaactcaaatggtcttttcaggtggcagtctggaaaacaactaacttggggggaaaaaggctgctccatgttctataaaagctgtacatgtgattttctctgctttaccttttatactcatttattttgttatttgtgtatgaaagcccttcncctatgaaagacnttcactgtaggtttgggcngctagaaagngatcnnnaaaa

SEQ ID NO: 169 - DNA, 1039 bp, Artificial Sequence
  Description of Artificial Sequence: Note = Synthetic Construct
  misc_feature (3)..(3): n is a, c, g, or t
  misc_feature (9)..(9): n is a, c, g, or t
  misc_feature (14)..(14): n is a, c, g, or t
  misc_feature (23)..(24): n is a, c, g, or t
  misc_feature (28)..(28): n is a, c, g, or t
  misc_feature (42)..(42): n is a, c, g, or t
  misc_feature (46)..(47): n is a, c, g, or t
  misc_feature (50)..(50): n is a, c, g, or t
  misc_feature (56)..(56): n is a, c, g, or t
  misc_feature (59)..(59): n is a, c, g, or t
  misc_feature (61)..(61): n is a, c, g, or t
  misc_feature (63)..(63): n is a, c, g, or t
  misc_feature (81)..(81): n is a, c, g, or t
  misc_feature (88)..(88): n is a, c, g, or t
  misc_feature (93)..(93): n is a, c, g, or t
  misc_feature (105)..(105): n is a, c, g, or t
  misc_feature (108)..(108): n is a, c, g, or t
  misc_feature (123)..(123): n is a, c, g, or t
  misc_feature (132)..(132): n is a, c, g, or t
  misc_feature (166)..(167): n is a, c, g, or t
  misc_feature (178)..(178): n is a, c, g, or t
  misc_feature (184)..(184): n is a, c, g, or t
  misc_feature (229)..(229): n is a, c, g, or t
  misc_feature (274)..(274): n is a, c, g, or t
  misc_feature (302)..(302): n is a, c, g, or t
  misc_feature (337)..(337): n is a, c, g, or t
  misc_feature (344)..(344): n is a, c, g, or t
  misc_feature (497)..(497): n is a, c, g, or t
  misc_feature (687)..(687): n is a, c, g, or t
  misc_feature (705)..(705): n is a, c, g, or t
  misc_feature (1005)..(1005): n is a, c, g, or t
  misc_feature (1016)..(1016): n is a, c, g, or t
  misc_feature (1022)..(1022): n is a, c, g, or t
  misc_feature (1037)..(1037): n is a, c, g, or t
aanttttgngagtntttggaatnnaacngcggttccttatgntggnnaanaaaccnctncnanaccccaataccttggatnttttaanatgcncctgggtaagcnaanttgaattattttccntgggataanaagtggaatcattgacagttttgtggtccttttnncatccccatgnggtttnatgactaggcactttatttcatggacaaaccagtgttgtccctcntggggactgagtgggattaaaaaaaccttccaaaaatgtgtaatntgatcaaacccattgagacaatcagtgnggagtattagcaaattaaactgacttgttcacttntgaaaantgatgtctgatttcggaagaatcccagtgcctcgggacatgaaagggagatgtaaccttgagttcatggttaggagggaattcatagagacagttggtaaaaatctgagtgaggttgagaggttggaggaccacattgtgtatttgctcatcntgtgagggagagactttgtactctgctctgagaaggcagaactgttaggcagacacttagagaatatatgtcatggcaaaagacatccacccaacaagtcttcagtaacaaagcactaaacagaaaggggttgaagagactggtcagtggctgagagcttttattgctcttacagaggactcggcatgcntagcagctcacaacagcntgtgacttcaacactatgcctctggcctcaggagacacctgtgtactcccacccagacacatatacttaaaaataaaagaaatcttttaaacattgagcaaatgtaatcaggtactaacattgaatatatctggggccaggaattattctggtttattgcctttttcggaagcctaatatcacacatagagaaataggcagcacaggcctaacagcccataatgtgtgctattctatcaatagtgccaagtattgacatggactattcaaaaggcccaaaagttaaatggcccagaagtncaacataaagncgggcnagctaaaagagatcntc

SEQ ID NO: 170 - DNA, 1058 bp, Artificial Sequence
  Description of Artificial Sequence: Note = Synthetic Construct
  misc_feature (17)..(17): n is a, c, g, or t
  misc_feature (42)..(42): n is a, c, g, or t
  misc_feature (49)..(49): n is a, c, g, or t
  misc_feature (59)..(59): n is a, c, g, or t
  misc_feature (69)..(69): n is a, c, g, or t
  misc_feature (71)..(71): n is a, c, g, or t
  misc_feature (79)..(79): n is a, c, g, or t
  misc_feature (91)..(91): n is a, c, g, or t
  misc_feature (99)..(99): n is a, c, g, or t
  misc_feature (113)..(113): n is a, c, g, or t
  misc_feature (122)..(122): n is a, c, g, or t
  misc_feature (147)..(147): n is a, c, g, or t
  misc_feature (163)..(163): n is a, c, g, or t
  misc_feature (204)..(204): n is a, c, g, or t
  misc_feature (212)..(212): n is a, c, g, or t
  misc_feature (240)..(240): n is a, c, g, or t
  misc_feature (245)..(245): n is a, c, g, or t
  misc_feature (269)..(269): n is a, c, g, or t
  misc_feature (274)..(274): n is a, c, g, or t
  misc_feature (350)..(350): n is a, c, g, or t
  misc_feature (1009)..(1010): n is a, c, g, or t
  misc_feature (1025)..(1025): n is a, c, g, or t
  misc_feature (1037)..(1037): n is a, c, g, or t
aaaagctttttttcagnttggccaatttttaacccattaaanattgttntttggaatcngcatttggtnangttattgncgaggaaggtantaagggantttttcccaaattncaaccattnttggccagttgggattttgattgantgggaaccccccaggntttaataagcctttggatttgttcacaggggattaacaaantcctttgnttaatggggattgaatttgggaaattgnttccntaattttccaggaccaatgcacantggantattagaactgatgtaacagagtgatatgggaccaagtaggaacaagggtgcaggtttgccgaggcaggtaattgntggtcttgtcattgtcataactttcttgaaagttttaggacttggacggacagaagacatgatcattagtatacttgatgacaagtggagatgaaaggacaaaaattgtgcacatcaagaggagaatttaacattgggttttcttgcattagctatccactcttgccctcaccctcccacccccttaatcccagttaccttgacgattgaggtcattttctctgaacacattctcttcttggatgttaaagtgccatttgacactgtgtttagggacactgcttaggccggggtgggggaattgccacagaagcttgaccttagaaggttgagactctggaagcctgagagagatgagatctgtcaaagaaacgcttagcgttggtatgggatgcgtaggaggctgtactcttgttctctagatgctatcacgggtgatgtaggagaaatgatctcactcagcccaagatcattcccttccaaatgtgctcatcccatcagcaagcaagacctgtactgaagccagcaggggcgtggtacagagtccggcattttttgcatgccatgctggtttgatgtttgaactctaaaggtggagactgttgggggcagcagggcagacagtcttctgatgatttctctgccttcaaactgaggtnnactcttgaaagattncacctgtaggtngggcaagctaaaagagaggcc

SEQ ID NO: 171 - DNA, 1043 bp, Artificial Sequence
  Description of Artificial Sequence: Note = Synthetic Construct
  misc_feature (15)..(15): n is a, c, g, or t
  misc_feature (27)..(27): n is a, c, g, or t
  misc_feature (34)..(34): n is a, c, g, or t
  misc_feature (40)..(40): n is a, c, g, or t
  misc_feature (49)..(50): n is a, c, g, or t
  misc_feature (53)..(53): n is a, c, g, or t
  misc_feature (61)..(61): n is a, c, g, or t
  misc_feature (70)..(70): n is a, c, g, or t
  misc_feature (73)..(73): n is a, c, g, or t
  misc_feature (90)..(90): n is a, c, g, or t
  misc_feature (93)..(93): n is a, c, g, or t
  misc_feature (105)..(105): n is a, c, g, or t
  misc_feature (114)..(114): n is a, c, g, or t
  misc_feature (125)..(125): n is a, c, g, or t
  misc_feature (131)..(131): n is a, c, g, or t
  misc_feature (142)..(142): n is a, c, g, or t
  misc_feature (147)..(147): n is a, c, g, or t
  misc_feature (191)..(191): n is a, c, g, or t
  misc_feature (215)..(215): n is a, c, g, or t
  misc_feature (230)..(231): n is a, c, g, or t
  misc_feature (252)..(253): n is a, c, g, or t
  misc_feature (271)..(271): n is a, c, g, or t
  misc_feature (293)..(293): n is a, c, g, or t
  misc_feature (326)..(326): n is a, c, g, or t
  misc_feature (351)..(351): n is a, c, g, or t
  misc_feature (456)..(456): n is a, c, g, or t
  misc_feature (552)..(552): n is a, c, g, or t
  misc_feature (650)..(650): n is a, c, g, or t
  misc_feature (984)..(984): n is a, c, g, or t
  misc_feature (1001)..(1001): n is a, c, g, or t
  misc_feature (1016)..(1016): n is a, c, g, or t
attttccattgcgcnccattgaacggntttgcgnggggtnttaggggtnnaanggattttnagtgtgccnaanaaggtacattgaaggcnttntttggatttggntttgtaaanccattcccttngaaaangagttgtagtnttaancggcaaacaaccaccggttgtagcgtggttttttgttgcaagcngcggttagggcggaaaaaaggatntaaggagatcctttnncttttcttgggggtctgacgnntcatgttgtgtggaattntgagcggttacaatttcacacngattttttatgcaaatccacttgccaagttggnataactgacttattttaccgggaantctccatgtatcttctttggacacttacccttacagagcccaggatgaattttgaccaagccaagtattcacacagcccaatgtgacatgttaccacaaattggngattttccttcagtacactcaaatgacacaagctttttctcgatgtctttcttgtcattcactaccaggatgaaattaattttatcttctgaggangcaatatacgatccacccaggaaaattcactttagatcttcgttctcatttcttggcaaacagaatttgagctgaatttctcttagaaaaatctgtcnttcagaaacttaaattcttgctgttccataacagaagtcagcaagtgactcaccctccagatacaggtatattacctccactcccatccacagagacttaattctagtcagcttcatgatagtgagccttcatccgtaaggagctgtatggtatgggaaggggatacagacagggccaggggtgtttttaaacggtaacccagggaccacatccattaaaaacactggactgtttgtgagagtgtatattcctgagcattgcctatcccttaaggtactacaaaatttgggagtgaggctcagcaaactattttaacatgcctctccaccaacnactcaagattcccgtgnacagttgaaagtttncaccaaaggtgggcaagctaaagagat

SEQ ID NO: 172 - DNA, 454 bp, Artificial Sequence
  Description of Artificial Sequence: Note = Synthetic Construct
  misc_feature (389)..(389): n is a, c, g, or t
  misc_feature (401)..(401): n is a, c, g, or t
  misc_feature (407)..(407): n is a, c, g, or t
  misc_feature (409)..(409): n is a, c, g, or t
  misc_feature (419)..(420): n is a, c, g, or t
  misc_feature (444)..(444): n is a, c, g, or t
  misc_feature (453)..(453): n is a, c, g, or t
aattcatccctcatttgccctgctagtgaaaactatttcagacctgaagacaacatccttgaaaacttctctggagaatgtgcagagatcaccatggcaacctgtcccgggccctgcctggcagggctccaaggcacacaaataacgccactggaatgtggtgcagggctccgggtggggtgactagaaaagctgccaattttccatgaaaaccaccggtgagaagcctcagcctcaggaaggtgtcagtagagagggctgggttctctctagcaccaagggacaggctgtgcgcaagcatgcgcagaagcacactcaccggcctcctttggggcagggctgcctgaaatgaaccggcttcagttttgtgcagctcaagggcacaaggntagtgccctttncttggncntgaggcactnntaaatgtaggttgggcgcgctaanaaagatccnt

SEQ ID NO: 173 - DNA, 873 bp, Artificial Sequence
  Description of Artificial Sequence: Note = Synthetic Construct
  misc_feature (56)..(56): n is a, c, g, or t
  misc_feature (103)..(103): n is a, c, g, or t
  misc_feature (110)..(110): n is a, c, g, or t
  misc_feature (112)..(112): n is a, c, g, or t
  misc_feature (199)..(199): n is a, c, g, or t
  misc_feature (202)..(202): n is a, c, g, or t
  misc_feature (213)..(213): n is a, c, g, or t
  misc_feature (221)..(221): n is a, c, g, or t
  misc_feature (245)..(245): n is a, c, g, or t
  misc_feature (249)..(249): n is a, c, g, or t
  misc_feature (305)..(305): n is a, c, g, or t
  misc_feature (807)..(807): n is a, c, g, or t
  misc_feature (827)..(827): n is a, c, g, or t
  misc_feature (839)..(839): n is a, c, g, or t
  misc_feature (841)..(841): n is a, c, g, or t
  misc_feature (856)..(856): n is a, c, g, or t
  misc_feature (858)..(858): n is a, c, g, or t
  misc_feature (862)..(862): n is a, c, g, or t
  misc_feature (872)..(872): n is a, c, g, or t
gttgttattcaatcatccacatttgtaaaaacacacttcgggtcctccttgtgtcnggcagtaccatccattgagtttcaggaagcagaagttttaaaagctnccagcancntttaaatccacagctcaagttgttgaacaccttgggaaactaccacttattcacccagaggagagttgattcaagtagttagtaccnttntgcatcagaanccaccagntactgccggtgagagtcggtaatnccangaactcatccatgcaggcaaatttaaggacacacggcttgacacagagatggttanatcggctgtgacagttctttagtgggagacttttgctttctgaatccacagggcttactttctttctttttctttttaagacaagctctcattttcatcttgagaaaatgtctgatcaagccaccaactgaaaacctgccattataaacgagggatttcacaatgctcattccaaaatctgcggctattcatttctggaagtgactcactgaggaaggacggctgttgggggtgggagggagagatcatttttaggagaccgcctgctctctgagaactgagcagaaaccccagagtggctagcacgtgtgtgcagcgaccccagctcagctctctgagtcaccccctcccccagatgacacgccatgaccagtctcctcgtgaaagccacttggtggacaaaaagccctttgggctgtgcacccagcctcacatctgcctctctgggggctattttcacataaatcaggagggaggcagcagcagttgcccacctgttttngactccgattgcttggggantgaaggactttntnaatgtaggtttgggncngctnaaaagatccnt

SEQ ID NO: 174 - DNA, 876 bp, Artificial Sequence
  Description of Artificial Sequence: Note = Synthetic Construct
  misc_feature (31)..(31): n is a, c, g, or t
  misc_feature (35)..(35): n is a, c, g, or t
  misc_feature (61)..(61): n is a, c, g, or t
  misc_feature (65)..(65): n is a, c, g, or t
  misc_feature (106)..(106): n is a, c, g, or t
  misc_feature (131)..(131): n is a, c, g, or t
  misc_feature (329)..(329): n is a, c, g, or t
  misc_feature (806)..(806): n is a, c, g, or t
  misc_feature (854)..(854): n is a, c, g, or t
  misc_feature (860)..(860): n is a, c, g, or t
  misc_feature (869)..(869): n is a, c, g, or t
gttgttattcaatcaattctgttgctttggnccangtcaaacagcccatccgggatgtgantatnggaactaacccatttatcctacagccaggaggaaacccaangggaggctgaggaaacggctgtggnttcataaaactctttgaatcataccttgggtgattcaaatgctttttactaggctctccttcatagtacctctctgtggacaaagacccagtccctttgaaaagcattgaaactcaaaccataccactatcagtttcagctttaatataaattagctttctaagttcagctgaccaccttttcactggaccttcactnatctcacagggaagatatattttcaacaattacaaagacatttctgggttggactatgcattcctttggccagattctacatcctttttttatgccagaattttttagcgttcctgtaagattgtcagtttcccctaggaaatccataaagctttaaatgccttctaaatagccaatattttaatgagaaatgtagtcactgatatctctttgtatttaaaggttattttgaggggagttgcttggttggttggttggttggttggttggttggttagttggttggttttggctttggttttctgtcccatggtaatatgatacttatgtcatagattagttaactcaaatggtcttttcaggtggcagtcttgaaaacaactaacttggggggaaaaaggctgctccatgttctataaaagctgtacatgtgattttctctgctttaccttttatactcatttattttgttatttntgtatgaaagcccttccgtcctgaaagacctttacctgtaggtttggnccgttnaaaagatcnctgggcc

SEQ ID NO: 175 - DNA, 459 bp, Artificial Sequence
  Description of Artificial Sequence: Note = Synthetic Construct
  misc_feature (60)..(60): n is a, c, g, or t
  misc_feature (378)..(378): n is a, c, g, or t
  misc_feature (393)..(393): n is a, c, g, or t
  misc_feature (395)..(395): n is a, c, g, or t
  misc_feature (410)..(410): n is a, c, g, or t
  misc_feature (414)..(414): n is a, c, g, or t
  misc_feature (428)..(429): n is a, c, g, or t
  misc_feature (440)..(440): n is a, c, g, or t
  misc_feature (455)..(455): n is a, c, g, or t
aattcagaaggatctcagaaattgaaagcatgtgcaaagataaagatttggggtagtagnagtggtcaaaagggacaaggtaataatggtaatatgcttttgtgtatgtgttcttttagagttatgttaaaatctagagaagcaaagtcgattctcatagatgcttttagtctttggaccctgactagagacagtttacaccctagacaagagagagaatggggttgagtaaaacagtcctcccgaactctccacagatgctttggcaaaagaaggaaatgagcttaaactttttggagctctcctgggaacagaaggaggtgggagacgtcttgcctccttgctggctcctattggagaagtgcttatttctggttntgggttttttaggtngnttgtctgggttcctngggncctgagggcacttnnaaatgtaggtntggcgcgctaaaaangatc

SEQ ID NO: 176 - DNA, 3133 bp, Artificial Sequence
  Description of Artificial Sequence: Note = Synthetic Construct
  misc_feature (9)..(9): n is a, c, g, or t
  misc_feature (12)..(12): n is a, c, g, or t
  misc_feature (14)..(14): n is a, c, g, or t
  misc_feature (16)..(16): n is a, c, g, or t
  misc_feature (32)..(32): n is a, c, g, or t
  misc_feature (705)..(705): n is a, c, g, or t
  misc_feature (1128)..(1128): n is a, c, g, or t
  misc_feature (1140)..(1140): n is a, c, g, or t
  misc_feature (1146)..(1146): n is a, c, g, or t
  misc_feature (1220)..(1220): n is a, c, g, or t
  misc_feature (1266)..(1266): n is a, c, g, or t
  misc_feature (1343)..(1343): n is a, c, g, or t
  misc_feature (1651)..(1651): n is a, c, g, or t
  misc_feature (1741)..(1741): n is a, c, g, or t
  misc_feature (1915)..(1915): n is a, c, g, or t
  misc_feature (1943)..(1943): n is a, c, g, or t
  misc_feature (2234)..(2234): n is a, c, g, or t
acccacacnccnancnacacccacacaccaanccacacccacacaccaaaccacacccacacaccaaaccacacccacacaccaaaccacacccacacaccaaaccacacccacacacccgagtgtggtgtgtcctcctcactgagtgtcagccagccctttcctctacttcaggtaaaggtttctccactgcctcactgtgtccctgtcacatgggcacaaagccatctcagcagtccttctcaaggacgtgggtgccaggtttggaagctggaatgcctacatctaaaatcttggccatgacttgtgacaacttacatatacatagacatatatacatatacagcttacatagacgcagagcctcagactcctctgaagaacgggttgattctgtgctctgcagagatgctgggagagtgtataaaaaggtcaagaaagcaggcttagaaagaagggcaactctacctagtgtctccttacaattttgttttacgtcctcttctgcccacagagcccttaagacactccctactttctgcatcattcctggtgtcttgtaggaacaagttagtgaatgatcactctgtaaacacatacctacaggtcctccttaccttgggctctggaacacccggtgaagtctgtgggtaggagggtctggctgaggttgagtgtatcaagtaatcaactggcagtaccctntggggagtggcctgtggtttcctgctcccctctttgggtgagaaatcctagggtggtgggagccaaggcttaggcaaaggttcaggcacagcagggtgtgggagggagtgagactatagtagaggtgagtggaaggtatggattcgaagactttcggattaaaaaaaaagcaaaaaaaaaaaaaaaaaaaaaaccaaaaaccaaaacaaaacaaaaaaccaaaaaacaaaacggtccaaccagtgagatgtggcttgctctgagttgctaattatgcagggcttagatctcaaaaacagtctgtgctctggggccactgctgacatccaagtcaggcccagaagctcttggtcttcatctttcctttccctctcaggctgcttgaagctgattgaggtattccttgcttgttcagccggttcntgatggtctccntgttcntcccagttctctccatgtttcttttgctttgaagtacaaaggaatacagttgcaggggttacatggcactcccntattcacttttagggttaccacaaaagcttgtgattctttccctcnttaggactgagcttctacccccgcacacaggcctaactttggtttccccacccataatggggcacccacccccaccnccgccccaccccaccccaagaaaaagaaaaaagaaaaagaaagaaatgaaacggccagctggctcttacccactttgggcagcaggtgtttcctccctagcttcccttttgcatctcatacttgttgcttgcacaccctcacccctctcttgctgcctttttcaaattaatagcctgcaacttcccttgcatatagagaatggttcccaggttcttactgggattagtgaacgctctttttgttgaggaaatgcttttaacaccaccaagtgctgtacccctcaaagttggtgaagctctagattcantgggctgtacaagggacacttgggaaaaatttgaacaggacaagcctgagggtgtgagtggggttggctcatctacacaggagctgcgantgagagggaaagggcccccaaacatctttgctaccactgccttcttaagtttggggacttggaaatcccgttgtttagatcttgaccgtaatcaggagtcagcgtagaggaggccccggaaggagggcccagcgcggattcgcccgcggcagggcggggaccaacagagggccntcggggataggggagcgccgccccgccntcccggggaaggacacattgcttgttagcaggaagccagccagacccggaggaggccgctccagcgttggtgttgccggtccggggctagcctgatccgggcagggtgagttgagacgatcgggtgagcttgggccggggacgccagcgtcttcagtcctggggattgtcccaggagggcaaggagcttggaggagggaggccgcacagctaggggagtcaggtctgagtcccgagtgtgctctaaagccggggcggtgagagtggcggcccgcccggggccgcgcagcgngcagtctcccccgcgtgggaagtggtaacttaacgcacagccacaggattcccggcctttagctgctggagggagggtggcttctcccggaggagtctgttgtgaaactcggttggagggcaccgtgggtgcgggcaagggagagatggggtcgccctgaagaagtggggggctggagtagaaagtggactttgtgcaaacctcaccccagagtagttagttaccaaggctggtttttttttttttttttttttgctcagacacaaggaaaatttgactcaatgttaaaatatgtaatttggcaggaaaacttttttcctagcctccttgctaatatagttggaacagggggctcccaagaggtatagagtcccccattttacaaaatgtggttcagtgggactgtggcccacccagtcgtgtatccatggaagagtggcttttatggagaagttcattttccttaaccttaaaaactgtaaaggatcttgtgcttgagaatattgttggccagctttatagtcttcatttataaaactatttagactagagtgttatagattataggtcttcaagtttccagtcaccagtccttggctttttagtatggaaatcaccagtaatggcaatataacatccctgcttctgtttcttagaaggctaaattacagtgtgttcaaactccgtgtcattgcaacaggttaaactaactttatacgtaggacatcagggtattgacattctcatcctaaagtcagtttgtctgtttccagaggaggaactgaagcagtggttctttaagtaactgactcagggctttcctgcctggcgcgcctgccaggcatagtgtagcattgtactgcatcttctttgaccagtttccccaggtgaagagcctg

SEQ ID NO: 177 - DNA, 2161 bp, Artificial Sequence
  Description of Artificial Sequence: Note = Synthetic Construct
  misc_feature (1336)..(1336): n is a, c, g, or t
  misc_feature (1568)..(1568): n is a, c, g, or t
ctggaagctcccttctcccctgtactctactctgcaaatccctgcaggtggacactgagagaagccacacacacctgtttttgttttccatctctgagggatctgccatctactgtacatgcagtttctgaaaacatttgtttggcggttttctatttgtttactaagttagttcagttttcatcagtggcacaaactagaagtcattcatatgagtaaaatttgttaaaacgtcttcataaagttttcagtttgcgaggagcatacaaggaaagggtcgcttaagtggaaagggagcaggctctgtggctttctcattctaacccttgtttgttcctgtgaggtgtggagccctgctctgctgctgtctggacagagcagagatccttgcagcagccacagctctttactgcagatgtgttctgggggcctggttctgactccttcagctcctggtagtgccctgcgtgataataacagcctcctgctcccagctccagacagctcgtctttctgttgcagcagcactgtgaacaccagagtgattctgagcttagattcaagatgacctcacacttatgggaatcctgtgcgtggacgtgttgcttsctgtttttactgcccavgatcttccagctgaatgccagagtgttgagtgtgcccarcctggggtarcccagcttgctccaccaccctctgtggatactccacccagtctgctgttaccaggcactggcccagtgaaaatctaaaggttttattgtttagtagaaaattaaaacacttactacagtttgaatgtgttgcacattatggtttgaggccaaaggaaggtaggcagaaggaaaacaggaggcaaggaggggaagaaagctggagagtctggctggagggcgatgccctcctggttctgaaagagccacacccctctgctgccagttacaggccgatctgctgcttagcaccaccctgatgtgctccagcatctcccgttccagcgtggtttctggtcgracctttattccacggttacttgaggggtgtgtgtgcgtgcgtgtgtgtgtgtgtgtgtgtgtgtgtgtgtgtgtgtgtgtacatgtctgtgtccccatgccacagcacttgtggaggtcagaggacaaaggacactaaattgcttctccctttccatcacgtgggtccctcaagcttggatcttgaaaacgttacttctagtgtaattgtcctaaaagttcacgtggactttaagtctcttgtttaaagtctgtaggcagttctgttcccgcagcacagttcctcacaaagccctctgatggctgattctttgctcttggangcacaaggctgtgccgtgcttaagacaggctgcacagcttargacttgcactgagggcgttctcgcctggttggctcarcatctggagtatattggtcatggcgagtcagggctcagctctcggtatttatctttcagtgcattgatgtatttgcccttacagacactgtacctgaattatttaacactgtaatgctagtgcctgatactgaattcatgactataagttcanarctgcaracacagccttaggtgttaaacagtatatttttaagagcttcaagtgcacagaacagtaggggtgcagttttgaccccctaggtctggactttgaggttgcatctcatgaatgcagctctgagctgggggcgccatactctacattgtaaagtaatgcacctcctaactacctgccatggtagcaagctccagccacctgaaaagcagccagccctcttggggcagcactgcatgaggaagcctgaaccccagcaaaggagcattgggctgctatgtctgttctgctacagcgacaaatcccagtgtgcacttgccaacagctggaggcatgccatagccagggtttcagcatggctgcccttggagagaggcgtgcgctgtgtgtgtgtgtgtgtgtgtgtgtgtgtgtgtgtgtgtgtgtgtgtgttagaataagcaactactgacaaattcargarcataaacattatggaaatttttttgtgtatgtcatcattttaattttaaaagatgccttattttctcctcttggaactaaagagattatatttcactttataaagaaaaaaaaaaaaaaaaaaaaaa

SEQ ID NO: 178 - DNA, 824 bp, Artificial Sequence; identical to SEQ ID NO: 155
  Description of Artificial Sequence: Note = Synthetic Construct
  misc_feature (6)..(6): n is a, c, g, or t
  misc_feature (12)..(13): n is a, c, g, or t
  misc_feature (15)..(16): n is a, c, g, or t
  misc_feature (19)..(19): n is a, c, g, or t
  misc_feature (26)..(26): n is a, c, g, or t
  misc_feature (28)..(28): n is a, c, g, or t
  misc_feature (30)..(30): n is a, c, g, or t
  misc_feature (32)..(32): n is a, c, g, or t
  misc_feature (35)..(35): n is a, c, g, or t
  misc_feature (38)..(39): n is a, c, g, or t
  misc_feature (42)..(42): n is a, c, g, or t
  misc_feature (44)..(45): n is a, c, g, or t
  misc_feature (51)..(51): n is a, c, g, or t
  misc_feature (60)..(60): n is a, c, g, or t
  misc_feature (63)..(63): n is a, c, g, or t
  misc_feature (65)..(65): n is a, c, g, or t
  misc_feature (72)..(72): n is a, c, g, or t
  misc_feature (85)..(85): n is a, c, g, or t
  misc_feature (124)..(124): n is a, c, g, or t
  misc_feature (140)..(140): n is a, c, g, or t
  misc_feature (147)..(147): n is a, c, g, or t
  misc_feature (180)..(180): n is a, c, g, or t
  misc_feature (212)..(212): n is a, c, g, or t
  misc_feature (222)..(222): n is a, c, g, or t
  misc_feature (225)..(225): n is a, c, g, or t
  misc_feature (237)..(237): n is a, c, g, or t
  misc_feature (271)..(271): n is a, c, g, or t
  misc_feature (336)..(336): n is a, c, g, or t
  misc_feature (399)..(399): n is a, c, g, or t

SEQ ID NO: 179 - DNA, 774 bp, Artificial Sequence; identical to SEQ ID NO: 156
  Description of Artificial Sequence: Note = Synthetic Construct
  misc_feature (8)..(9): n is a, c, g, or t
  misc_feature (11)..(11): n is a, c, g, or t
  misc_feature (14)..(14): n is a, c, g, or t
  misc_feature (24)..(24): n is a, c, g, or t
  misc_feature (26)..(26): n is a, c, g, or t
  misc_feature (45)..(45): n is a, c, g, or t
  misc_feature (48)..(48): n is a, c, g, or t
  misc_feature (54)..(54): n is a, c, g, or t
  misc_feature (58)..(58): n is a, c, g, or t
  misc_feature (64)..(64): n is a, c, g, or t
  misc_feature (79)..(79): n is a, c, g, or t
  misc_feature (84)..(84): n is a, c, g, or t
  misc_feature (93)..(93): n is a, c, g, or t
  misc_feature (105)..(105): n is a, c, g, or t
  misc_feature (122)..(122): n is a, c, g, or t
  misc_feature (129)..(129): n is a, c, g, or t
  misc_feature (134)..(134): n is a, c, g, or t
  misc_feature (144)..(144): n is a, c, g, or t
  misc_feature (146)..(146): n is a, c, g, or t
  misc_feature (152)..(152): n is a, c, g, or t
  misc_feature (170)..(170): n is a, c, g, or t
  misc_feature (193)..(193): n is a, c, g, or t
  misc_feature (204)..(204): n is a, c, g, or t
  misc_feature (213)..(213): n is a, c, g, or t
  misc_feature (225)..(225): n is a, c, g, or t
  misc_feature (258)..(258): n is a, c, g, or t
  misc_feature (274)..(274): n is a, c, g, or t
  misc_feature (288)..(288): n is a, c, g, or t
  misc_feature (374)..(374): n is a, c, g, or t
  misc_feature (708)..(708): n is a, c, g, or t
  misc_feature (739)..(739): n is a, c, g, or t
  misc_feature (741)..(741): n is a, c, g, or t
  misc_feature (756)..(756): n is a, c, g, or t
  misc_feature (768)..(768): n is a, c, g, or t

SEQ ID NO: 180 - DNA, 248 bp, Artificial Sequence; identical to SEQ ID NO: 157
  Description of Artificial Sequence: Note = Synthetic Construct
  misc_feature (185)..(185): n is a, c, g, or t
  misc_feature (230)..(230): n is a, c, g, or t
  misc_feature (234)..(234): n is a, c, g, or t

SEQ ID NO: 181 - DNA, 880 bp, Artificial Sequence; identical to SEQ ID NO: 159
  Description of Artificial Sequence: Note = Synthetic Construct
  misc_feature (3)..(3): n is a, c, g, or t
  misc_feature (8)..(8): n is a, c, g, or t
  misc_feature (15)..(15): n is a, c, g, or t
  misc_feature (151)..(151): n is a, c, g, or t
  misc_feature (182)..(182): n is a, c, g, or t
  misc_feature (194)..(194): n is a, c, g, or t
  misc_feature (196)..(196): n is a, c, g, or t
  misc_feature (229)..(229): n is a, c, g, or t
  misc_feature (253)..(253): n is a, c, g, or t
  misc_feature (324)..(324): n is a, c, g, or t
  misc_feature (348)..(348): n is a, c, g, or t
  misc_feature (467)..(467): n is a, c, g, or t
  misc_feature (818)..(819): n is a, c, g, or t
  misc_feature (822)..(822): n is a, c, g, or t
  misc_feature (834)..(835): n is a, c, g, or t
  misc_feature (849)..(850): n is a, c, g, or t
  misc_feature (865)..(865): n is a, c, g, or t

SEQ ID NO: 182 - DNA, 864 bp, Artificial Sequence; identical to SEQ ID NO: 160
  Description of Artificial Sequence: Note = Synthetic Construct
  misc_feature (9)..(9): n is a, c, g, or t
  misc_feature (17)..(17): n is a, c, g, or t
  misc_feature (22)..(22): n is a, c, g, or t
  misc_feature (29)..(29): n is a, c, g, or t
  misc_feature (43)..(43): n is a, c, g, or t
  misc_feature (79)..(79): n is a, c, g, or t
  misc_feature (84)..(84): n is a, c, g, or t
  misc_feature (120)..(120): n is a, c, g, or t
  misc_feature (127)..(127): n is a, c, g, or t
  misc_feature (134)..(134): n is a, c, g, or t
  misc_feature (136)..(136): n is a, c, g, or t
  misc_feature (162)..(162): n is a, c, g, or t
  misc_feature (173)..(173): n is a, c, g, or t
  misc_feature (180)..(180): n is a, c, g, or t
  misc_feature (182)..(182): n is a, c, g, or t
  misc_feature (210)..(210): n is a, c, g, or t
  misc_feature (216)..(216): n is a, c, g, or t
  misc_feature (233)..(233): n is a, c, g, or t
  misc_feature (238)..(238): n is a, c, g, or t
  misc_feature (256)..(256): n is a, c, g, or t
  misc_feature (322)..(322): n is a, c, g, or t
  misc_feature (340)..(340): n is a, c, g, or t
  misc_feature (371)..(371): n is a, c, g, or t
  misc_feature (373)..(373): n is a, c, g, or t
  misc_feature (484)..(484): n is a, c, g, or t
  misc_feature (834)..(834): n is a, c, g, or t
  misc_feature (849)..(849): n is a, c, g, or t

SEQ ID NO: 183 - DNA, 874 bp, Artificial Sequence; identical to SEQ ID NO: 161
  Description of Artificial Sequence: Note = Synthetic Construct
  misc_feature (20)..(20): n is a, c, g, or t
  misc_feature (25)..(25): n is a, c, g, or t
  misc_feature (33)..(34): n is a, c, g, or t
  misc_feature (135)..(135): n is a, c, g, or t
  misc_feature (154)..(154): n is a, c, g, or t
  misc_feature (164)..(164): n is a, c, g, or t
  misc_feature (182)..(182): n is a, c, g, or t
  misc_feature (187)..(187): n is a, c, g, or t
  misc_feature (197)..(197): n is a, c, g, or t
  misc_feature (217)..(217): n is a, c, g, or t
  misc_feature (219)..(219): n is a, c, g, or t
  misc_feature (221)..(221): n is a, c, g, or t
  misc_feature (223)..(223): n is a, c, g, or t
  misc_feature (229)..(229): n is a, c, g, or t
  misc_feature (283)..(283): n is a, c, g, or t
  misc_feature (293)..(293): n is a, c, g, or t
  misc_feature (327)..(327): n is a, c, g, or t
  misc_feature (348)..(348): n is a, c, g, or t
  misc_feature (367)..(367): n is a, c, g, or t
  misc_feature (409)..(409): n is a, c, g, or t
  misc_feature (418)..(418): n is a, c, g, or t
  misc_feature (422)..(422): n is a, c, g, or t
  misc_feature (439)..(439): n is a, c, g, or t
  misc_feature (465)..(465): n is a, c, g, or t
  misc_feature (493)..(493): n is a, c, g, or t
  misc_feature (528)..(528): n is a, c, g, or t
  misc_feature (839)..(839): n is a, c, g, or t
  misc_feature (841)..(841): n is a, c, g, or t
  misc_feature (859)..(859): n is a, c, g, or t

SEQ ID NO: 184 - DNA, 886 bp, Artificial Sequence; identical to SEQ ID NO: 162
  Description of Artificial Sequence: Note = Synthetic Construct
  misc_feature (7)..(7): n is a, c, g, or t
  misc_feature (47)..(47): n is a, c, g, or t
  misc_feature (57)..(57): n is a, c, g, or t
  misc_feature (78)..(78): n is a, c, g, or t
  misc_feature (105)..(105): n is a, c, g, or t
  misc_feature (190)..(190): n is a, c, g, or t
  misc_feature (287)..(287): n is a, c, g, or t
  misc_feature (356)..(356): n is a, c, g, or t
  misc_feature (363)..(363): n is a, c, g, or t
  misc_feature (639)..(639): n is a, c, g, or t
  misc_feature (838)..(838): n is a, c, g, or t

SEQ ID NO: 185 - DNA, 865 bp, Artificial Sequence; identical to SEQ ID NO: 163
  Description of Artificial Sequence: Note = Synthetic Construct
  misc_feature (20)..(20): n is a, c, g, or t
  misc_feature (55)..(55): n is a, c, g, or t
  misc_feature (59)..(59): n is a, c, g, or t
  misc_feature (79)..(80): n is a, c, g, or t
  misc_feature (90)..(90): n is a, c, g, or t
  misc_feature (106)..(106): n is a, c, g, or t
  misc_feature (108)..(108): n is a, c, g, or t
  misc_feature (127)..(127): n is a, c, g, or t
  misc_feature (179)..(179): n is a, c, g, or t
  misc_feature (212)..(212): n is a, c, g, or t
  misc_feature (241)..(241): n is a, c, g, or t
  misc_feature (259)..(259): n is a, c, g, or t
  misc_feature (262)..(262): n is a, c, g, or t
  misc_feature (271)..(271): n is a, c, g, or t
  misc_feature (365)..(365): n is a, c, g, or t
  misc_feature (464)..(464): n is a, c, g, or t
  misc_feature (528)..(528): n is a, c, g, or t
  misc_feature (833)..(833): n is a, c, g, or t
  misc_feature (850)..(850): n is a, c, g, or t

SEQ ID NO: 186 - DNA, 859 bp, Artificial Sequence; identical to SEQ ID NO: 164
  Description of Artificial Sequence: Note = Synthetic Construct
  misc_feature (3)..(3): n is a, c, g, or t
  misc_feature (9)..(9): n is a, c, g, or t
  misc_feature (11)..(11): n is a, c, g, or t
  misc_feature (16)..(16): n is a, c, g, or t
  misc_feature (26)..(26): n is a, c, g, or t
  misc_feature (39)..(39): n is a, c, g, or t
  misc_feature (58)..(58): n is a, c, g, or t
  misc_feature (79)..(79): n is a, c, g, or t
  misc_feature (85)..(85): n is a, c, g, or t
  misc_feature (90)..(90): n is a, c, g, or t
  misc_feature (94)..(94): n is a, c, g, or t
  misc_feature (144)..(144): n is a, c, g, or t
  misc_feature (146)..(147): n is a, c, g, or t
  misc_feature (157)..(157): n is a, c, g, or t
  misc_feature (178)..(178): n is a, c, g, or t
  misc_feature (215)..(215): n is a, c, g, or t
  misc_feature (248)..(248): n is a, c, g, or t
  misc_feature (263)..(263): n is a, c, g, or t
  misc_feature (281)..(281): n is a, c, g, or t
  misc_feature (295)..(295): n is a, c, g, or t
  misc_feature (422)..(422): n is a, c, g, or t
  misc_feature (568)..(568): n is a, c, g, or t
  misc_feature (726)..(726): n is a, c, g, or t
  misc_feature (798)..(799): n is a, c, g, or t
  misc_feature (815)..(815): n is a, c, g, or t
  misc_feature (819)..(819): n is a, c, g, or t
  misc_feature (829)..(830): n is a, c, g, or t
  misc_feature (834)..(834): n is a, c, g, or t
  misc_feature (840)..(840): n is a, c, g, or t
  misc_feature (842)..(842): n is a, c, g, or t
  misc_feature (848)..(848): n is a, c, g, or t

SEQ ID NO: 187 - DNA, 883 bp, Artificial Sequence; identical to SEQ ID NO: 74
  Description of Artificial Sequence: Note = Synthetic Construct
  misc_feature (7)..(8): n is a, c, g, or t
  misc_feature (11)..(11): n is a, c, g, or t
  misc_feature (25)..(26): n is a, c, g, or t
  misc_feature (28)..(29): n is a, c, g, or t
  misc_feature (32)..(32): n is a, c, g, or t
  misc_feature (36)..(36): n is a, c, g, or t
  misc_feature (52)..(53): n is a, c, g, or t
  misc_feature (61)..(61): n is a, c, g, or t
  misc_feature (67)..(67): n is a, c, g, or t
  misc_feature (77)..(77): n is a, c, g, or t
  misc_feature (85)..(85): n is a, c, g, or t
  misc_feature (105)..(105): n is a, c, g, or t
  misc_feature (107)..(107): n is a, c, g, or t
  misc_feature (112)..(112): n is a, c, g, or t
  misc_feature (118)..(118): n is a, c, g, or t
  misc_feature (155)..(155): n is a, c, g, or t
  misc_feature (159)..(160): n is a, c, g, or t
  misc_feature (180)..(180): n is a, c, g, or t
  misc_feature (184)..(184): n is a, c, g, or t
  misc_feature (199)..(200): n is a, c, g, or t
  misc_feature (202)..(202): n is a, c, g, or t
  misc_feature (248)..(248): n is a, c, g, or t
  misc_feature (250)..(250): n is a, c, g, or t
  misc_feature (259)..(259): n is a, c, g, or t
  misc_feature (266)..(266): n is a, c, g, or t
  misc_feature (273)..(274): n is a, c, g, or t
  misc_feature (277)..(277): n is a, c, g, or t
  misc_feature (303)..(303): n is a, c, g, or t
  misc_feature (330)..(330): n is a, c, g, or t
  misc_feature (335)..(335): n is a, c, g, or t
  misc_feature (338)..(338): n is a, c, g, or t
  misc_feature (345)..(345): n is a, c, g, or t
  misc_feature (474)..(474): n is a, c, g, or t
  misc_feature (500)..(500): n is a, c, g, or t
  misc_feature (582)..(582): n is a, c, g, or t
  misc_feature (688)..(688): n is a, c, g, or t
  misc_feature (696)..(696): n is a, c, g, or t
  misc_feature (721)..(721): n is a, c, g, or t
  misc_feature (749)..(749): n is a, c, g, or t

SEQ ID NO: 188 - DNA, 987 bp, Artificial Sequence
  Description of Artificial Sequence: Note = Synthetic Construct
  misc_feature (3)..(4): n is a, c, g, or t
  misc_feature (11)..(11): n is a, c, g, or t
  misc_feature (14)..(14): n is a, c, g, or t
  misc_feature (21)..(21): n is a, c, g, or t
  misc_feature (25)..(25): n is a, c, g, or t
  misc_feature (40)..(40): n is a, c, g, or t
  misc_feature (57)..(57): n is a, c, g, or t
  misc_feature (68)..(68): n is a, c, g, or t
  misc_feature (91)..(92): n is a, c, g, or t
  misc_feature (95)..(95): n is a, c, g, or t
  misc_feature (114)..(114): n is a, c, g, or t
  misc_feature (119)..(119): n is a, c, g, or t
  misc_feature (123)..(123): n is a, c, g, or t
  misc_feature (130)..(130): n is a, c, g, or t
  misc_feature (137)..(137): n is a, c, g, or t
  misc_feature (146)..(146): n is a, c, g, or t
  misc_feature (148)..(148): n is a, c, g, or t
  misc_feature (162)..(162): n is a, c, g, or t
  misc_feature (169)..(169): n is a, c, g, or t
  misc_feature (171)..(171): n is a, c, g, or t
  misc_feature (175)..(175): n is a, c, g, or t
  misc_feature (187)..(187): n is a, c, g, or t
  misc_feature (195)..(195): n is a, c, g, or t
  misc_feature (200)..(200): n is a, c, g, or t
  misc_feature (249)..(249): n is a, c, g, or t
  misc_feature (253)..(253): n is a, c, g, or t
  misc_feature (284)..(284): n is a, c, g, or t
  misc_feature (291)..(291): n is a, c, g, or t
  misc_feature (298)..(298): n is a, c, g, or t
  misc_feature (324)..(324): n is a, c, g, or t
  misc_feature (337)..(337): n is a, c, g, or t
  misc_feature (341)..(341): n is a, c, g, or t
  misc_feature (551)..(551): n is a, c, g, or t
  misc_feature (563)..(563): n is a, c, g, or t
canntttcccntanccgaaantttntttttggcccaaccngtaagacggattttttncaattgcgganccaatggaaccggtttgccgggnngtnttttggggtgaacggtttnttaantggngccaaanaaggttnattggaggncntatttgaattggtntgtaaancntttncttggaaaaggnttgtagcnttaanccggcaacaaaccaccggttgtacggtgtttttttgttgcagccgcagnttangggcagaaaaagaattcaggagatccttaanctttttnttcgggntctgacgctcatgttgtgtggatttntgagcggttacantttnacacggaattctattcactggcatgactcacttccccgggttcatgagtcagcagtgagttatctaggtatgtgttttgtgttgcaaattcccatatatagaatatggtcccggggaccatagaaagttgagcagttgggcaaaattcttccccaggaggtgtgttcaagagaagaggttcagcccttgaaagagcttccgtttctatcntcacaaacatcntgaaaaataggctaaatgttattctgtgaagagtcattactggttttactgatggtggaagttctcagactgtctagaaaggtaattttaaaacgtaagaaaattagacccctgtccccagatctgttggtgttgagaaatctgtagaaacttgagcaggaggaagtacaagaaagtatgtagctattgtaatccctttcaggaaggatgtgtttaaagctctattgttagggcctttcgcttgcactgtgaagtaattttttactttttataagcttaaaggatggcttaataagacgtcttagaaatgtccacattatattggatcaacaaacgccaaagcatcagtttgcgtcaggggccacggggcatggggactaacggttcattcttttggaatctggatgcctaggtgcagtagggc

SEQ ID NO: 189 - DNA, 1031 bp, Artificial Sequence
  Description of Artificial Sequence: Note = Synthetic Construct
  misc_feature (13)..(13): n is a, c, g, or t
  misc_feature (42)..(42): n is a, c, g, or t
  misc_feature (48)..(48): n is a, c, g, or t
  misc_feature (51)..(51): n is a, c, g, or t
  misc_feature (74)..(74): n is a, c, g, or t
  misc_feature (92)..(92): n is a, c, g, or t
  misc_feature (104)..(104): n is a, c, g, or t
  misc_feature (109)..(109): n is a, c, g, or t
  misc_feature (135)..(135): n is a, c, g, or t
  misc_feature (154)..(154): n is a, c, g, or t
  misc_feature (159)..(159): n is a, c, g, or t
  misc_feature (164)..(164): n is a, c, g, or t
  misc_feature (166)..(166): n is a, c, g, or t
  misc_feature (189)..(189): n is a, c, g, or t
  misc_feature (250)..(250): n is a, c, g, or t
  misc_feature (265)..(265): n is a, c, g, or t
  misc_feature (273)..(273): n is a, c, g, or t
  misc_feature (280)..(280): n is a, c, g, or t
  misc_feature (298)..(298): n is a, c, g, or t
  misc_feature (301)..(301): n is a, c, g, or t
  misc_feature (321)..(321): n is a, c, g, or t
  misc_feature (354)..(354): n is a, c, g, or t
  misc_feature (377)..(377): n is a, c, g, or t
  misc_feature (432)..(432): n is a, c, g, or t
  misc_feature (447)..(447): n is a, c, g, or t
  misc_feature (987)..(987): n is a, c, g, or t
  misc_feature (998)..(998): n is a, c, g, or t
  misc_feature (1017)..(1017): n is a, c, g, or t
agtcctgcccccntgggaagggtaaccttgacctaacccccnaataanttncccttaggattgcttggcatggnttttacgcgtaaccctantaaaactttgangaaanttccttccctttgattctagcaatgnaccggcattttgccaatcnattcngctgnantaattatgaagttccggtttaancaatttgaagtttaacattcatgtatcttcacagtcatgtgtttttgtgtatgatgaaacnccatgctgtcttgcnccatttgntcaggantgagtcatttgtctagcntgnccatgctgtatatgctaccnatccatcagttattcatagccagcttggttgtngactaacaacagtagtttcacantgctttgtgttaaagtcaccttcagtttatttaatgttggcaccaaagcacatgntagtgatgtcagcantgctgatatgccagggaaaagccattaggtattcctttatgtgtaaaggttgaaaattgttgattgaatgaagggaaaaattattctgctgattgatgttgggaagggcattagaggatcatattactagtttttgactaagctctgaagtttgtacatgaatttatggatcctccctgcaatagattcctgatgctctctaacatccatcttctcatatgacatccttctggccagatatctagctttattttctctactctgctgcaccactgcctctgcctttggggatcagtccccatagaatgggaggaaaacaatggcctccttagaccatgaatggccttctctcagtaccatgaagaatcgggccatcttgtcagagggaaattttccttacatcctcagtcactgtttctgtcaccattatacattatatgtttgcctaagagtgagggtgatttgtgtagtaaggaatgtatgtgttgttgtggtagtttggatgagaacggctccccaaagctcatgtatttgaatggntatgaaagacnttcacctgtaggtttggcnagctagaaagagga

SEQ ID NO: 190 - DNA, 1138 bp, Artificial Sequence
  Description of Artificial Sequence: Note = Synthetic Construct
  misc_feature (4)..(4): n is a, c, g, or t
  misc_feature (9)..(9): n is a, c, g, or t
  misc_feature (11)..(11): n is a, c, g, or t
  misc_feature (16)..(16): n is a, c, g, or t
  misc_feature (18)..(18): n is a, c, g, or t
  misc_feature (21)..(21): n is a, c, g, or t
  misc_feature (27)..(28): n is a, c, g, or t
  misc_feature (32)..(33): n is a, c, g, or t
  misc_feature (42)..(42): n is a, c, g, or t
  misc_feature (45)..(45): n is a, c, g, or t
  misc_feature (54)..(54): n is a, c, g, or t
  misc_feature (57)..(57): n is a, c, g, or t
  misc_feature (66)..(66): n is a, c, g, or t
  misc_feature (69)..(69): n is a, c, g, or t
  misc_feature (71)..(71): n is a, c, g, or t
  misc_feature (74)..(78): n is a, c, g, or t
  misc_feature (82)..(82): n is a, c, g, or t
  misc_feature (85)..(85): n is a, c, g, or t
  misc_feature (93)..(94): n is a, c, g, or t
  misc_feature (98)..(98): n is a, c, g, or t
  misc_feature (105)..(105): n is a, c, g, or t
  misc_feature (107)..(107): n is a, c, g, or t
  misc_feature (110)..(110): n is a, c, g, or t
  misc_feature (114)..(114): n is a, c, g, or t
  misc_feature (121)..(121): n is a, c, g, or t
  misc_feature (123)..(123): n is a, c, g, or t
  misc_feature (126)..(128): n is a, c, g, or t
  misc_feature (131)..(131): n is a, c, g, or t
  misc_feature (136)..(136): n is a, c, g, or t
  misc_feature (138)..(139): n is a, c, g, or t
  misc_feature (141)..(141): n is a, c, g, or t
  misc_feature (144)..(145): n is a, c, g, or t
  misc_feature (149)..(150): n is a, c, g, or t
  misc_feature (177)..(177): n is a, c, g, or t
  misc_feature (183)..(183): n is a, c, g, or t
  misc_feature (187)..(187): n is a, c, g, or t
  misc_feature (190)..(190): n is a, c, g, or t
  misc_feature (196)..(196): n is a, c, g, or t
  misc_feature (199)..(199): n is a, c, g, or t
  misc_feature (207)..(207): n is a, c, g, or t
  misc_feature (209)..(209): n is a, c, g, or t
  misc_feature (218)..(221): n is a, c, g, or t
  misc_feature (223)..(223): n is a, c, g, or t
  misc_feature (226)..(227): n is a, c, g, or t
  misc_feature (229)..(229): n is a, c, g, or t
  misc_feature (231)..(231): n is a, c, g, or t
  misc_feature (233)..(233): n is a, c, g, or t
  misc_feature (236)..(237): n is a, c, g, or t
  misc_feature (245)..(245): n is a, c, g, or t
  misc_feature (248)..(249): n is a, c, g, or t
  misc_feature (254)..(258): n is a, c, g, or t
  misc_feature (261)..(264): n is a, c, g, or t
  misc_feature (269)..(269): n is a, c, g, or t
  misc_feature (274)..(274): n is a, c, g, or t
  misc_feature (279)..(283): n is a, c, g, or t
  misc_feature (288)..(288): n is a, c, g, or t
  misc_feature (291)..(291): n is a, c, g, or t
  misc_feature (293)..(293): n is a, c, g, or t
  misc_feature (295)..(296): n is a, c, g, or t
  misc_feature (299)..(299): n is a, c, g, or t
  misc_feature (302)..(303): n is a, c, g, or t
  misc_feature (307)..(307): n is a, c, g, or t
  misc_feature (310)..(310): n is a, c, g, or t
  misc_feature (312)..(312): n is a, c, g, or t
  misc_feature (314)..(314): n is a, c, g, or t
  misc_feature (322)..(322): n is a, c, g, or t
  misc_feature (332)..(332): n is a, c, g, or t
  misc_feature (334)..(334): n is a, c, g, or t
  misc_feature (337)..(337): n is a, c, g, or t
  misc_feature (341)..(341): n is a, c, g, or t
  misc_feature (345)..(345): n is a, c, g, or t
  misc_feature (348)..(348): n is a, c, g, or t
  misc_feature (350)..(350): n is a, c, g, or t
  misc_feature (354)..(355): n is a, c, g, or t
  misc_feature (357)..(357): n is a, c, g, or t
  misc_feature (365)..(365): n is a, c, g, or t
  misc_feature (367)..(367): n is a, c, g, or t
  misc_feature (369)..(369): n is a, c, g, or t
  misc_feature (372)..(374): n is a, c, g, or t
  misc_feature (383)..(383): n is a, c, g, or t
  misc_feature (387)..(388): n is a, c, g, or t
  misc_feature (391)..(391): n is a, c, g, or t
  misc_feature (396)..(396): n is a, c, g, or t
  misc_feature (398)..(398): n is a, c, g, or t
  misc_feature (411)..(411): n is a, c, g, or t
  misc_feature (413)..(415): n is a, c, g, or t
  misc_feature (418)..(418): n is a, c, g, or t
  misc_feature (421)..(423): n is a, c, g, or t
  misc_feature (438)..(439): n is a, c, g, or t
  misc_feature (442)..(442): n is a, c, g, or t
  misc_feature (444)..(444): n is a, c, g, or t
  misc_feature (447)..(447): n is a, c, g, or t
  misc_feature (451)..(451): n is a, c, g, or t
  misc_feature (453)..(453): n is a, c, g, or t
  misc_feature (460)..(460): n is a, c, g, or t
  misc_feature (462)..(463): n is a, c, g, or t
  misc_feature (468)..(469): n is a, c, g, or t
  misc_feature (472)..(472): n is a, c, g, or t
  misc_feature (477)..(478): n is a, c, g, or t
  misc_feature (481)..(481): n is a, c, g, or t
  misc_feature (483)..(484): n is a, c, g, or t
  misc_feature (488)..(488): n is a, c, g, or t
  misc_feature (502)..(503): n is a, c, g, or t
  misc_feature (511)..(511): n is a, c, g, or t
  misc_feature (519)..(519): n is a, c, g, or t
  misc_feature (521)..(521): n is a, c, g, or t
  misc_feature (523)..(527): n is a, c, g, or t
  misc_feature (530)..(531): n is a, c, g, or t
  misc_feature (534)..(535): n is a, c, g, or t
  misc_feature (539)..(539): n is a, c, g, or t
  misc_feature (544)..(544): n is a, c, g, or t
  misc_feature (546)..(546): n is a, c, g, or t
  misc_feature (548)..(548): n is a, c, g, or t
  misc_feature (550)..(550): n is a, c, g, or t
  misc_feature (554)..(554): n is a, c, g, or t
  misc_feature (564)..(564): n is a, c, g, or t
  misc_feature (566)..(566): n is a, c, g, or t
  misc_feature (570)..(570): n is a, c, g, or t
  misc_feature (573)..(573): n is a, c, g, or t
  misc_feature (577)..(578): n is a, c, g, or t
  misc_feature (583)..(584): n is a, c, g, or t
  misc_feature (586)..(586): n is a, c, g, or t
  misc_feature (591)..(592): n is a, c, g, or t
  misc_feature (594)..(594): n is a, c, g, or t
  misc_feature (596)..(596): n is a, c, g, or t
  misc_feature (605)..(608): n is a, c, g, or t
  misc_feature (610)..(610): n is a, c, g, or t
  misc_feature (614)..(616): n is a, c, g, or t
  misc_feature (620)..(620): n is a, c, g, or t
  misc_feature (622)..(622): n is a, c, g, or t
  misc_feature (631)..(632): n is a, c, g, or t
  misc_feature (641)..(641): n is a, c, g, or t
  misc_feature (644)..(644): n is a, c, g, or t
  misc_feature (647)..(647): n is a, c, g, or t
  misc_feature (650)..(650): n is a, c, g, or t
  misc_feature (655)..(655): n is a, c, g, or t
  misc_feature (657)..(657): n is a, c, g, or t
  misc_feature (663)..(663): n is a, c, g, or t
  misc_feature (668)..(668): n is a, c, g, or t
  misc_feature (671)..(672): n is a, c, g, or t
  misc_feature (674)..(674): n is a, c, g, or t
  misc_feature (679)..(680): n is a, c, g, or t
  misc_feature (691)..(691): n is a, c, g, or t
  misc_feature (694)..(694): n is a, c, g, or t
  misc_feature (697)..(697): n is a, c, g, or t
  misc_feature (700)..(700): n is a, c, g, or t
  misc_feature (705)..(705): n is a, c, g, or t
  misc_feature (707)..(707): n is a, c, g, or t
  misc_feature (717)..(718): n is a, c, g, or t
  misc_feature (720)..(725): n is a, c, g, or t
  misc_feature (727)..(729): n is a, c, g, or t
  misc_feature (735)..(735): n is a, c, g, or t
  misc_feature (745)..(747): n is a, c, g, or t
  misc_feature (749)..(749): n is a, c, g, or t
  misc_feature (751)..(752): n is a, c, g, or t
  misc_feature (757)..(758): n is a, c, g, or t
  misc_feature (764)..(764): n is a, c, g, or t
  misc_feature (772)..(772): n is a, c, g, or t
  misc_feature (778)..(780): n is a, c, g, or t
  misc_feature (783)..(783): n is a, c, g, or t
  misc_feature (785)..(785): n is a, c, g, or t
  misc_feature (791)..(792): n is a, c, g, or t
  misc_feature (801)..(801): n is a, c, g, or t
  misc_feature (806)..(810): n is a, c, g, or t
  misc_feature (814)..(815): n is a, c, g, or t
  misc_feature (819)..(820): n is a, c, g, or t
  misc_feature (822)..(822): n is a, c, g, or t
  misc_feature (828)..(828): n is a, c, g, or t
  misc_feature (832)..(832): n is a, c, g, or t
  misc_feature (835)..(837): n is a, c, g, or t
  misc_feature (841)..(843): n is a, c, g, or t
  misc_feature (846)..(846): n is a, c, g, or t
  misc_feature (848)..(848): n is a, c, g, or t
  misc_feature (850)..(850): n is a, c, g, or t
  misc_feature (854)..(855): n is a, c, g, or t
  misc_feature (862)..(862): n is a, c, g, or t
  misc_feature (864)..(864): n is a, c, g, or t
  misc_feature (868)..(868): n is a, c, g, or t
  misc_feature (879)..(879): n is a, c, g, or t
  misc_feature (890)..(890): n is a, c, g, or t
  misc_feature (892)..(893): n is a, c, g, or t
  misc_feature (895)..(895): n is a, c, g, or t
  misc_feature (897)..(897): n is a, c, g, or t
  misc_feature (900)..(900): n is a, c, g, or t
  misc_feature (905)..(905): n is a, c, g, or t
  misc_feature (908)..(908): n is a, c, g, or t
  misc_feature (911)..(911): n is a, c, g, or t
  misc_feature (913)..(913): n is a, c, g, or t
  misc_feature (918)..(918): n is a, c, g, or t
  misc_feature (922)..(922): n is a, c, g, or t
  misc_feature (934)..(934): n is a, c, g, or t
  misc_feature (936)..(936): n is a, c, g, or t
  misc_feature (945)..(945): n is a, c, g, or t
  misc_feature (953)..(953): n is a, c, g, or t
  misc_feature (955)..(955): n is a, c, g, or t
  misc_feature (960)..(961): n is a, c, g, or t
  misc_feature (967)..(967): n is a, c, g, or t
  misc_feature (970)..(971): n is a, c, g, or t
  misc_feature (973)..(974): n is a, c, g, or t
  misc_feature (991)..(991): n is a, c, g, or t
  misc_feature (997)..(997): n is a, c, g, or t
  misc_feature (1009)..(1009): n is a, c, g, or t
  misc_feature (1012)..(1012): n is a, c, g, or t
  misc_feature (1017)..(1017): n is a, c, g, or t
  misc_feature (1020)..(1020): n is a, c, g, or t
  misc_feature (1024)..(1024): n is a, c, g, or t
  misc_feature (1027)..(1027): n is a, c, g, or t
  misc_feature (1037)..(1039): n is a, c, g, or t
  misc_feature (1044)..(1044): n is a, c, g, or t
  misc_feature (1047)..(1047): n is a, c, g, or t
  misc_feature (1049)..(1049): n is a, c, g, or t
  misc_feature (1053)..(1054): n is a, c, g, or t
  misc_feature (1056)..(1056): n is a, c, g, or t
  misc_feature (1059)..(1059): n is a, c, g, or t
  misc_feature (1063)..(1063): n is a, c, g, or t
  misc_feature (1066)..(1066): n is a, c, g, or t
  misc_feature (1068)..(1068): n is a, c, g, or t
  misc_feature (1071)..(1071): n is a, c, g, or t
  misc_feature (1074)..(1074): n is a, c, g, or t
  misc_feature (1077)..(1077): n is a, c, g, or t
  misc_feature (1082)..(1082): n is a, c, g, or t
  misc_feature (1085)..(1086): n is a, c, g, or t
  misc_feature (1090)..(1090): n is a, c, g, or t
  misc_feature (1097)..(1097): n is a, c, g, or t
  misc_feature (1099)..(1100): n is a, c, g, or t
  misc_feature (1111)..(1112): n is a, c, g, or t
  misc_feature (1120)..(1120): n is a, c, g, or t
  misc_feature (1122)..(1122): n is a, c, g, or t
caancaccncncgganangancccggnngaanngagaccggncanacacgacgngancagcgaagncancncgnnnnnggcncgncagagcgnncgancgcgacnanagnacgncgccganangannnaanccggngnnancanncagnngggaaacagcccagagagataggacancaaacnaganagnacacancgngacgaganancccgaaagnnnnanacnnanananaannaagagaanagnncaacnnnnncannnngaccnggaanagggnnnnngaacngcnancnnccnagnngcgngancnanacacgacngaagagacgngngcngaanaganacncngaanngnaacaagangnanaannngacaggaancacnnagnagggngngggcaagcgcaangnnnganaannnacaacagaaaaaganncanancanaagngncgagagnannagaannagngaaanncgnanncgcnccgaagaagaacgnnggacaaanaccgacgnancnnnnncanngannaaancgcangnancngacnaggaacgacngnaagngcnaagnnacganngncagannanangaaacacgnnnnanacannnaccnancgcagcggnncaggaaagnggngcnacngaggngngccaanaaganaanngngagannacaaaaaaaanggnggncangcagnanaaaaccgagnncnnnnnnannnagaganagaacgagannnangnncgaannacgcgnacaagaangggaannncgnangacgcnncggaacaangaccnnnnnaaanncagnnanccaacnaggnaannnagannnagngncnccanngcaagcncncacnaagaagaaganacccccccccnannangnagnaagcnccnccngngaggnaacncgagaccccccngnaggcagcancgccaagngnagcgnncagagnacnnanntaacagaccgaaggaanagccgnaaaacaccaaanacnagacnacnagcnagncccgcgcacnnnggagnaancnaccnncnaangacnganancgnggnccncgctnttnngttnaacgcancnnggggcggcccnngggaaacncngggggacaaaaggcgg

SEQ ID NO: 191 - DNA, 1072 bp, Artificial Sequence
  Description of Artificial Sequence: Note = Synthetic Construct
  misc_feature (6)..(6): n is a, c, g, or t
  misc_feature (9)..(9): n is a, c, g, or t
  misc_feature (14)..(14): n is a, c, g, or t
  misc_feature (21)..(21): n is a, c, g, or t
  misc_feature (25)..(26): n is a, c, g, or t
  misc_feature (57)..(57): n is a, c, g, or t
  misc_feature (66)..(66): n is a, c, g, or t
  misc_feature (77)..(77): n is a, c, g, or t
  misc_feature (81)..(85): n is a, c, g, or t
  misc_feature (99)..(100): n is a, c, g, or t
  misc_feature (107)..(107): n is a, c, g, or t
  misc_feature (110)..(113): n is a, c, g, or t
  misc_feature (115)..(115): n is a, c, g, or t
  misc_feature (122)..(122): n is a, c, g, or t
  misc_feature (157)..(157): n is a, c, g, or t
  misc_feature (176)..(176): n is a, c, g, or t
  misc_feature (185)..(186): n is a, c, g, or t
  misc_feature (199)..(199): n is a, c, g, or t
  misc_feature (202)..(202): n is a, c, g, or t
  misc_feature (268)..(268): n is a, c, g, or t
  misc_feature (276)..(276): n is a, c, g, or t
  misc_feature (291)..(291): n is a, c, g, or t
  misc_feature (302)..(302): n is a, c, g, or t
  misc_feature (307)..(307): n is a, c, g, or t
  misc_feature (319)..(319): n is a, c, g, or t
  misc_feature (331)..(331): n is a, c, g, or t
  misc_feature (352)..(352): n is a, c, g, or t
  misc_feature (357)..(357): n is a, c, g, or t
  misc_feature (443)..(443): n is a, c, g, or t
  misc_feature (462)..(462): n is a, c, g, or t
  misc_feature (473)..(473): n is a, c, g, or t
  misc_feature (517)..(517): n is a, c, g, or t
  misc_feature (569)..(569): n is a, c, g, or t
  misc_feature (589)..(589): n is a, c, g, or t
  misc_feature (702)..(702): n is a, c, g, or t
  misc_feature (1040)..(1040): n is a, c, g, or t
  misc_feature (1053)..(1053): n is a, c, g, or t
cccttnaantgggnccccaangggnntcccccccaggggttccccccccccctaaanttgcctttntaacccagggntggnnnnntggaatttttgaanntggaggntcnnnngnaacattnccgggatttttgaggagtttgaatgaccggaattntactttttgggttccggcnggcaccccnntcccccaaggttnagngagttttgaaggtaaaagtcacaaggtttttaaagggtttgaggatgacagttcaacgtgaagatnttgacaangattgatttttgtanacaggaaaagntcccnatcccaaccaanaaaaccgtgttnaggcccaatgttcagagctcngggcnccagggaagggcaaacgcccaattgattggaaagctgcagtttaagacatgtcccaggaattggtaccttgtgtgattggacttanccttgcaactttgtttgangcataacttgntgtgtctttgggggagcatttatgtgccccacttgagacccatntcaggacacgcaggacacggtcccagtgagctttccctccagagagaggtgntagggtccatcagtgagctnccaaggacaggggaccagaacgttgaaaacaaaccagggttgtgaaggagagcagggcggggggggggggagggggggcgttctctagaatagattgaacctgcagagctgcntgctacctgaagttgtcacccttttacccacccacctcatctgtctctgcttgaccatctcagcaagtgtcacctcgctgccaggacacaagtttcctaaagcttatttcagtgtcagccgctggggagacacattcagggcatgggcgtcccccagccctcggggagaatgtgggaggtggcgatgtgggagggattcgagagaagagaatgcttaagaaccatccagggaacctgtgcgtttgaaggtctgagttacacacaggctgctcagaaggagctagagctcccaaataggagctgtgatcaggctgtgtgtgtgtgctggtgaaagactnccacctgtaggtnggccaagctaaatgagatc

SEQ ID NO: 192 - DNA, 1094 bp, Artificial Sequence
  Description of Artificial Sequence: Note = Synthetic Construct
  misc_feature (6)..(6): n is a, c, g, or t
  misc_feature (13)..(13): n is a, c, g, or t
  misc_feature (28)..(28): n is a, c, g, or t
  misc_feature (30)..(30): n is a, c, g, or t
  misc_feature (33)..(33): n is a, c, g, or t
  misc_feature (70)..(70): n is a, c, g, or t
  misc_feature (76)..(76): n is a, c, g, or t
  misc_feature (92)..(92): n is a, c, g, or t
  misc_feature (104)..(104): n is a, c, g, or t
  misc_feature (110)..(110): n is a, c, g, or t
  misc_feature (131)..(131): n is a, c, g, or t
  misc_feature (133)..(133): n is a, c, g, or t
  misc_feature (155)..(155): n is a, c, g, or t
  misc_feature (165)..(165): n is a, c, g, or t
  misc_feature (186)..(186): n is a, c, g, or t
  misc_feature (193)..(193): n is a, c, g, or t
  misc_feature (196)..(196): n is a, c, g, or t
  misc_feature (277)..(277): n is a, c, g, or t
  misc_feature (284)..(284): n is a, c, g, or t
  misc_feature (288)..(288): n is a, c, g, or t
  misc_feature (290)..(290): n is a, c, g, or t
  misc_feature (306)..(306): n is a, c, g, or t
  misc_feature (309)..(309): n is a, c, g, or t
  misc_feature (329)..(329): n is a, c, g, or t
  misc_feature (331)..(331): n is a, c, g, or t
  misc_feature (344)..(344): n is a, c, g, or t
  misc_feature (348)..(348): n is a, c, g, or t
  misc_feature (355)..(355): n is a, c, g, or t
  misc_feature (364)..(364): n is a, c, g, or t
  misc_feature (390)..(390): n is a, c, g, or t
  misc_feature (404)..(404): n is a, c, g, or t
  misc_feature (446)..(446): n is a, c, g, or t
  misc_feature (480)..(480): n is a, c, g, or t
  misc_feature (503)..(503): n is a, c, g, or t
  misc_feature (514)..(514): n is a, c, g, or t
  misc_feature (559)..(559): n is a, c, g, or t
  misc_feature (566)..(566): n is a, c, g, or t
  misc_feature (603)..(603): n is a, c, g, or t
  misc_feature (609)..(609): n is a, c, g, or t
  misc_feature (764)..(764): n is a, c, g, or t
  misc_feature (771)..(771): n is a, c, g, or t
  misc_feature (1061)..(1061): n is a, c, g, or t
ggtttngggtganatcctcccaatgccnanaanttcccttttttaagattttttttttccgggaaaattntaaaanttttaactggggtggnaaataataaggntgtttntggggttggcccaatttttgnantttaggaaaagttctttgggtnaattccagcnttgattggaggagcaattatnttgttanaanttatggttgtggggatgcttgttaaatcttttagatgtttccccttctgtctcccttttggaatggtcttaataggttgcnaaaattntacntnttggatcagctttttnatnagatttagcccagtgtgctnancttgtgagacccntttnacagganttgcttggnccatttgaaacacgtatttatgtcangattcataacagtngcaaaaatatagttatgaagcagcaagaaaatcactttatgnttggaggtcaccacaacatgaggaatgtattaancgcagtattagagagttcgaganccactatcttngaggatgcgttagactgatgtttcccttctcgcttggagttgacnttgccantagagggcaacagcatcagtattgttcccagtccccntcacantgattcgaactttaaggacactgatctctggctggtagagggttcagcacacataccagagttacgagtcacgtgccagaagggcaaactgaacacggaattagagggaactcgatgtctccggcttgcactggtcttctcttgcactagaatcnttcatcntgctcccagtccgggacgtccaggcaacaagggcgtggaaagtgagggggctgggaggtgtgtttgccttgcctcaggcgctgggtggggttggggcgtgccagcactccctgggcgggcctcaccgatgctggccactataaggccagccagactgcgacacagtccatcccctcgaccactcttttggcgcttcattgtcgagtgtggtgagctctcactggggcgtccctctaagatctgtccactcctggttttaggggttaagcctttcgtgcccctgaaagttncccacctgtagtgggccaagctaaaatgagatc

SEQ ID NO: 193 - DNA, 1107 bp, Artificial Sequence
  Description of Artificial Sequence: Note = Synthetic Construct
  misc_feature (34)..(34): n is a, c, g, or t
  misc_feature (370)..(370): n is a, c, g, or t
  misc_feature (409)..(409): n is a, c, g, or t
  misc_feature (412)..(412): n is a, c, g, or t
  misc_feature (434)..(434): n is a, c, g, or t
  misc_feature (444)..(444): n is a, c, g, or t
  misc_feature (501)..(501): n is a, c, g, or t
  misc_feature (529)..(529): n is a, c, g, or t
  misc_feature (531)..(531): n is a, c, g, or t
  misc_feature (534)..(534): n is a, c, g, or t
  misc_feature (579)..(579): n is a, c, g, or t
  misc_feature (682)..(682): n is a, c, g, or t
  misc_feature (694)..(694): n is a, c, g, or t
  misc_feature (697)..(697): n is a, c, g, or t
  misc_feature (710)..(710): n is a, c, g, or t
  misc_feature (719)..(719): n is a, c, g, or t
  misc_feature (725)..(725): n is a, c, g, or t
  misc_feature (727)..(727): n is a, c, g, or t
  misc_feature (747)..(747): n is a, c, g, or t
  misc_feature (760)..(760): n is a, c, g, or t
  misc_feature (769)..(769): n is a, c, g, or t
  misc_feature (782)..(782): n is a, c, g, or t
  misc_feature (820)..(820): n is a, c, g, or t
  misc_feature (852)..(852): n is a, c, g, or t
  misc_feature (859)..(859): n is a, c, g, or t
  misc_feature (868)..(868): n is a, c, g, or t
  misc_feature (883)..(883): n is a, c, g, or t
  misc_feature (892)..(892): n is a, c, g, or t
  misc_feature (898)..(898): n is a, c, g, or t
  misc_feature (905)..(905): n is a, c, g, or t
  misc_feature (908)..(908): n is a, c, g, or t
  misc_feature (914)..(914): n is a, c, g, or t
  misc_feature (944)..(944): n is a, c, g, or t
  misc_feature (958)..(958): n is a, c, g, or t
  misc_feature (976)..(976): n is a, c, g, or t
  misc_feature (981)..(981): n is a, c, g, or t
  misc_feature (987)..(987): n is a, c, g, or t
  misc_feature (1030)..(1030): n is a, c, g, or t
  misc_feature (1033)..(1033): n is a, c, g, or t
  misc_feature (1041)..(1042): n is a, c, g, or t
  misc_feature (1053)..(1053): n is a, c, g, or t
  misc_feature (1056)..(1056): n is a, c, g, or t
  misc_feature (1067)..(1067): n is a, c, g, or t
  misc_feature (1085)..(1085): n is a, c, g, or t
  misc_feature (1088)..(1088): n is a, c, g, or t
  misc_feature (1090)..(1091): n is a, c, g, or t
  misc_feature (1093)..(1093): n is a, c, g, or t
  misc_feature (1097)..(1097): n is a, c, g, or t
  misc_feature (1101)..(1103): n is a, c, g, or t
atctcatttagcttggcccacctacaggtggganactttcaaacctgtgggagacccctttcacaggaattgcctgagaccatctgaaaacacagtatttatgtcacgattcataacagtagcaaaaatatagttatgaagcagcaacgaaaatcactttatggttggagcgtcaccacaacatgaagaatgtattaatccgcagtattagagaggtcgagaaccactatcttagaggatgcggtagactgactgcttcccctctcgcttggagttgaccttgccactagagggcaacagcatcagtattgttcccagtccccctcacactgattcgaactttaaggacactgatctctggctggtaganggttcagcacacataccagagttacgagtcacgtgccanaanggcaaactgaacaccgaattanagggaactcnatgtctccggcttgcactggtcttctcctgcactaaaatccttcatcctgctcccantccgggacgtccaagcaacaaaggcgtngnaanttaaggggctgggaagtgtgtttgccttgcctcaagcgctgggtnggggtttgggcgtgccaacactccctgggcggggctcaacgatgctggcactataaaggcaaccagactgcgacacaatccatcccctcaacaatcctttggngcctcaatgtcnacntgttgtgagctcncactggggngtcccncnaaatttgtcactcctggtcnaagggttaaaccnttcctgccnatcaacctctgcnggctcaatggtggaatgcactggattcaaattttcggngcccaaggaaacaaggaaaaccagggctgctnggctgtncaaaaaaancccagggtaagggancccatgggngggaanctaaacngcntttctnggggtcaagaagggtttccccgggggtgtnaaccccccccaatntttggcccctcaggaggnttcangggaanccccattccttccttgccaatcaaaagccccatttccttgaanccngggggaanntttaaaacccnaancccctccattnttaaccccccccaatggnccngnngnaccnttgnnntttg

SEQ ID NO: 194 - DNA, 1069 bp, Artificial Sequence
  Description of Artificial Sequence: Note = Synthetic Construct
  misc_feature (11)..(11): n is a, c, g, or t
  misc_feature (16)..(16): n is a, c, g, or t
  misc_feature (25)..(25): n is a, c, g, or t
  misc_feature (29)..(29): n is a, c, g, or t
  misc_feature (36)..(36): n is a, c, g, or t
  misc_feature (48)..(49): n is a, c, g, or t
  misc_feature (51)..(52): n is a, c, g, or t
  misc_feature (68)..(68): n is a, c, g, or t
  misc_feature (94)..(94): n is a, c, g, or t
  misc_feature (99)..(99): n is a, c, g, or t
  misc_feature (111)..(111): n is a, c, g, or t
  misc_feature (119)..(119): n is a, c, g, or t
  misc_feature (142)..(142): n is a, c, g, or t
  misc_feature (149)..(149): n is a, c, g, or t
  misc_feature (171)..(171): n is a, c, g, or t
  misc_feature (202)..(202): n is a, c, g, or t
  misc_feature (224)..(224): n is a, c, g, or t
  misc_feature (230)..(230): n is a, c, g, or t
  misc_feature (239)..(239): n is a, c, g, or t
  misc_feature (252)..(252): n is a, c, g, or t
  misc_feature (254)..(254): n is a, c, g, or t
  misc_feature (266)..(266): n is a, c, g, or t
  misc_feature (270)..(270): n is a, c, g, or t
  misc_feature (294)..(294): n is a, c, g, or t
  misc_feature (296)..(296): n is a, c, g, or t
  misc_feature (312)..(312): n is a, c, g, or t
  misc_feature (323)..(323): n is a, c, g, or t
  misc_feature (360)..(360): n is a, c, g, or t
  misc_feature (475)..(475): n is a, c, g, or t
  misc_feature (514)..(514): n is a, c, g, or t
  misc_feature (540)..(540): n is a, c, g, or t
  misc_feature (1002)..(1002): n is a, c, g, or t
  misc_feature (1036)..(1036): n is a, c, g, or t
  misc_feature (1066)..(1066): n is a, c, g, or t
aattttttttnccggnaaaattttnaaanttttaantgggggggtaannannaaggttgtttctgggnttggcccatttttgcacattaggganagttntttggggtaaanttccagcngttgattggaggagcaagtgatnttgttanaatttatggttgtgggggatgntgttaaaatcttttaggattggttccccttntgtctccctttttggacatggntcttanataggtggntcaaaattctacntnttggaatcagcntatntcatcaggatttagcccagtgtgntnaacctgtggagacccntttcacagganttgcttgagaccatttgaaacacagtatttatgtcangattcataacagtagcaaaaatatagttatgaagcagcaacgaaatcactttatggttggagcgtcaccacaacatgaggaatgtattaatccgcagtattagagaggtcgaganccactatcttagaggatgcggtagactgattgcttcccntcttcgcttggagttgaccttgccantagagggcaacagcatcagtattgttcccagtccccctcacactgattcgaactttaaggacactgatctctggctggtagagggttcagcacacataccagagttacgagtcacgtgccagaagggcaaactgaacacggaattagagggaactcgatgtctccggcttgcactggtcttctcttgcactagaatccttcatcctgctcccagtccgggacgtccaggcaacaagggcgtggaaagtgagggggctgggaggtgtgtttgccttgcctcaggcgctgggtggggttggggcgtgccagcactccctgggcgggcctcaccgatgctggccactataaggccagccagactgcgacacagtccatcccctcgaccactcttttggcgcttcattgtcgacgtgtggtgagctctcactggggcgtccctctaagatctgtccactcctggtntaggggttaagcctttcgtgccctgaaagatttncacctgtaggtggggcaagctaaaagagangcc

SEQ ID NO: 195 - DNA, 1058 bp, Artificial Sequence
  Description of Artificial Sequence: Note = Synthetic Construct
  misc_feature (22)..(22): n is a, c, g, or t
  misc_feature (50)..(52): n is a, c, g, or t
  misc_feature (54)..(54): n is a, c, g, or t
  misc_feature (58)..(58): n is a, c, g, or t
  misc_feature (69)..(69): n is a, c, g, or t
  misc_feature (82)..(82): n is a, c, g, or t
  misc_feature (97)..(97): n is a, c, g, or t
  misc_feature (106)..(106): n is a, c, g, or t
  misc_feature (118)..(118): n is a, c, g, or t
  misc_feature (147)..(147): n is a, c, g, or t
  misc_feature (170)..(170): n is a, c, g, or t
  misc_feature (211)..(211): n is a, c, g, or t
  misc_feature (214)..(214): n is a, c, g, or t
  misc_feature (216)..(216): n is a, c, g, or t
  misc_feature (229)..(229): n is a, c, g, or t
  misc_feature (242)..(242): n is a, c, g, or t
  misc_feature (245)..(245): n is a, c, g, or t
  misc_feature (293)..(293): n is a, c, g, or t
  misc_feature (301)..(301): n is a, c, g, or t
  misc_feature (337)..(337): n is a, c, g, or t
  misc_feature (365)..(365): n is a, c, g, or t
  misc_feature (385)..(385): n is a, c, g, or t
  misc_feature (389)..(389): n is a, c, g, or t
  misc_feature (396)..(396): n is a, c, g, or t
  misc_feature (401)..(401): n is a, c, g, or t
  misc_feature (403)..(403): n is a, c, g, or t
  misc_feature (430)..(430): n is a, c, g, or t
  misc_feature (451)..(451): n is a, c, g, or t
  misc_feature (464)..(464): n is a, c, g, or t
  misc_feature (473)..(473): n is a, c, g, or t
  misc_feature (487)..(487): n is a, c, g, or t
  misc_feature (492)..(492): n is a, c, g, or t
  misc_feature (497)..(497): n is a, c, g, or t
  misc_feature (548)..(548): n is a, c, g, or t
  misc_feature (567)..(567): n is a, c, g, or t
  misc_feature (1022)..(1022): n is a, c, g, or t
  misc_feature (1026)..(1026): n is a, c, g, or t
  misc_feature (1034)..(1034): n is a, c, g, or t
caggttttgggttttccaaggncccccccctgggggttacaaaatggcgnnnantcgnggtgggaaccngacgggtttaagntaccgggtttccccntggagtccntgggggttcctntccgaccttcggttaccggtacctgcccnctttttcctttgggagggtgggntttttcatagctcagctgtagtatctcagttcgtttagtcnttngnccaagttggtttntgcaggacccccngtnagccggaccggtgccccttatccggtaatattgtcttgagtccaaccngtagacangattattgccattggcagcagcaatgtaacaggttngcagagcgaggtatgtaggcggtgtacngggttcttgaagtggtgccntaanttacggntacantngagggacagtatttggtatttgcgctnttgttgaagccagttactttnggaaaggagttgntagttcttnatccggcaaacaanccacngttgntagcggtggtttttttgtttgcaagcagcagattacgcgcagaaaaaaagnatctcaggaagatcctttnatcttttctttcggggtctgacgctcatgttgtgtggaattgtgagcggataacaatttcacacagaatttctcttagaaaaatctgtccttcagaaacttaaattctgctgttccataacagaagtcagcaagtgactcaccctccagatacaggtatattacctccactcccatccacagagacttaattctagtcagcttcatgatagtgagccttcatccgtaaggagctgtatggtatgggaaggggatacagacagggccaggggtgtttttaaacggtaacccagggaccacatccattaaaaacactggactgtttgtgagagtgtatattcctgagcattgcctatcccttaaggtactacaaaatttgggagtgaggctcagcaaactattttaacatgcctctcccacccaactactcaagattccccgtgcacagttgaaagntttnccacctgnaggtggggccaagctaaaagagat

SEQ ID NO: 196 - DNA, 1046 bp, Artificial Sequence
  Description of Artificial Sequence: Note = Synthetic Construct
  misc_feature (3)..(4): n is a, c, g, or t
  misc_feature (9)..(10): n is a, c, g, or t
  misc_feature (23)..(23): n is a, c, g, or t
  misc_feature (27)..(27): n is a, c, g, or t
  misc_feature (33)..(33): n is a, c, g, or t
  misc_feature (51)..(51): n is a, c, g, or t
  misc_feature (54)..(57): n is a, c, g, or t
  misc_feature (59)..(59): n is a, c, g, or t
  misc_feature (62)..(62): n is a, c, g, or t
  misc_feature (69)..(71): n is a, c, g, or t
  misc_feature (74)..(74): n is a, c, g, or t
  misc_feature (79)..(79): n is a, c, g, or t
  misc_feature (82)..(84): n is a, c, g, or t
  misc_feature (97)..(97): n is a, c, g, or t
  misc_feature (100)..(100): n is a, c, g, or t
  misc_feature (102)..(102): n is a, c, g, or t
  misc_feature (106)..(106): n is a, c, g, or t
  misc_feature (108)..(108): n is a, c, g, or t
  misc_feature (110)..(110): n is a, c, g, or t
  misc_feature (117)..(117): n is a, c, g, or t
  misc_feature (119)..(119): n is a, c, g, or t
  misc_feature (124)..(124): n is a, c, g, or t
  misc_feature (127)..(127): n is a, c, g, or t
  misc_feature (131)..(132): n is a, c, g, or t
  misc_feature (136)..(136): n is a, c, g, or t
  misc_feature (146)..(147): n is a, c, g, or t
  misc_feature (149)..(149): n is a, c, g, or t
  misc_feature (157)..(157): n is a, c, g, or t
  misc_feature (163)..(163): n is a, c, g, or t
  misc_feature (165)..(166): n is a, c, g, or t
  misc_feature (173)..(174): n is a, c, g, or t
  misc_feature (183)..(183): n is a, c, g, or t
  misc_feature (194)..(194): n is a, c, g, or t
  misc_feature (198)..(199): n is a, c, g, or t
  misc_feature (203)..(203): n is a, c, g, or t
  misc_feature (205)..(205): n is a, c, g, or t
  misc_feature (215)..(215): n is a, c, g, or t
  misc_feature (220)..(220): n is a, c, g, or t
  misc_feature (227)..(229): n is a, c, g, or t
  misc_feature (236)..(237): n is a, c, g, or t
  misc_feature (244)..(244): n is a, c, g, or t
  misc_feature (246)..(246): n is a, c, g, or t
  misc_feature (255)..(255): n is a, c, g, or t
  misc_feature (257)..(257): n is a, c, g, or t
  misc_feature (270)..(270): n is a, c, g, or t
  misc_feature (278)..(278): n is a, c, g, or t
  misc_feature (307)..(307): n is a, c, g, or t
  misc_feature (310)..(310): n is a, c, g, or t
  misc_feature (330)..(332): n is a, c, g, or t
  misc_feature (334)..(334): n is a, c, g, or t
  misc_feature (340)..(340): n is a, c, g, or t
  misc_feature (342)..(342): n is a, c, g, or t
  misc_feature (344)..(344): n is a, c, g, or t
  misc_feature (354)..(354): n is a, c, g, or t
  misc_feature (358)..(358): n is a, c, g, or t
  misc_feature (360)..(360): n is a, c, g, or t
  misc_feature (366)..(367): n is a, c, g, or t
  misc_feature (373)..(373): n is a, c, g, or t
  misc_feature (380)..(380): n is a, c, g, or t
  misc_feature (388)..(388): n is a, c, g, or t
  misc_feature (404)..(404): n is a, c, g, or t
  misc_feature (407)..(407): n is a, c, g, or t
  misc_feature (424)..(425): n is a, c, g, or t
  misc_feature (444)..(444): n is a, c, g, or t
  misc_feature (452)..(452): n is a, c, g, or t
  misc_feature (482)..(482): n is a, c, g, or t
  misc_feature (489)..(489): n is a, c, g, or t
  misc_feature (498)..(500): n is a, c, g, or t
  misc_feature (521)..(521): n is a, c, g, or t
  misc_feature (527)..(527): n is a, c, g, or t
  misc_feature (545)..(545): n is a, c, g, or t
  misc_feature (557)..(557): n is a, c, g, or t
  misc_feature (560)..(560): n is a, c, g, or t
  misc_feature (587)..(587): n is a, c, g, or t
  misc_feature (591)..(592): n is a, c, g, or t
  misc_feature (604)..(604): n is a, c, g, or t
  misc_feature (606)..(606): n is a, c, g, or t
  misc_feature (612)..(612): n is a, c, g, or t
  misc_feature (615)..(615): n is a, c, g, or t
  misc_feature (622)..(622): n is a, c, g, or t
  misc_feature (626)..(626): n is a, c, g, or t
  misc_feature (633)..(633): n is a, c, g, or t
  misc_feature (652)..(652): n is a, c, g, or t
  misc_feature (672)..(672): n is a, c, g, or t
  misc_feature (678)..(678): n is a, c, g, or t
  misc_feature (694)..(694): n is a, c, g, or t
  misc_feature (719)..(719): n is a, c, g, or t
  misc_feature (729)..(729): n is a, c, g, or t
  misc_feature (739)..(739): n is a, c, g, or t
  misc_feature (743)..(743): n is a, c, g, or t
  misc_feature (745)..(746): n is a, c, g, or t
  misc_feature (755)..(755): n is a, c, g, or t
  misc_feature (760)..(760): n is a, c, g, or t
  misc_feature (802)..(802): n is a, c, g, or t
  misc_feature (837)..(839): n is a, c, g, or t
  misc_feature (842)..(842): n is a, c, g, or t
  misc_feature (845)..(845): n is a, c, g, or t
  misc_feature (850)..(850): n is a, c, g, or t
  misc_feature (855)..(855): n is a, c, g, or t
  misc_feature (857)..(857): n is a, c, g, or t
  misc_feature (860)..(860): n is a, c, g, or t
  misc_feature (862)..(862): n is a, c, g, or t
  misc_feature (864)..(864): n is a, c, g, or t
  misc_feature (933)..(933): n is a, c, g, or t
  misc_feature (946)..(946): n is a, c, g, or t
  misc_feature (953)..(953): n is a, c, g, or t
  misc_feature (955)..(955): n is a, c, g, or t
  misc_feature (962)..(962): n is a, c, g, or t
  misc_feature (967)..(967): n is a, c, g, or t
  misc_feature (970)..(970): n is a, c, g, or t
  misc_feature (977)..(977): n is a, c, g, or t
  misc_feature (993)..(993): n is a, c, g, or t
  misc_feature (1007)..(1007): n is a, c, g, or t
  misc_feature (1018)..(1019): n is a, c, g, or t
  misc_feature (1023)..(1023): n is a, c, g, or t
  misc_feature (1028)..(1028): n is a, c, g, or t
  misc_feature (1031)..(1031): n is a, c, g, or t
  misc_feature (1043)..(1043): n is a, c, g, or t
cannaaaannagttccaaggaantggntgcccngaacaaggacccaaaacntgnnnnanaangggggannnaanggcanaannnatggacgagagtnaanancgcnangnagaagantnaaaantcnccanntggngccccaaatnncncaattganccaaancnntagaggnncccaagacnaatgggcactntgannagancnggccagaagncaagngggggannntcatagnnacatggnanaaataaagntntgtaaacccggantggcaatngaaaccagcaaagacccatgaacgtgagnganaccagttggaaacaatgaannnantgggtnantnacaggaatgnggtnangacgcnnagtgancccaaanaggcaacnccattgaaagccttcnccnccatggaaatactgtanntaaaacaaacaaacaaatnacaaaaanaaaaaacccaaagcttaagtggagtgcccnttccagntagccaccnnntaagaactgtaaatcgcaccntcccangccagatgcaggtaaggnaggattacaggnatntcggagggctcaggagggaatgggtcncaanntgagctgaggcncnggtganttncgctacntcgnaaaaaangagaagtcatgtgggacgnatgtgtgtaagcacagctcntgtgangtcaagtcagcaacantatgccatactctgaagacagaggnccataatagnattgttacangatncnngacttttanaaaancaaaatcctaaatcctattctccgtgggcccacacgaaacanccatccatcaggatcatctcacagttgcctctgannnttngtnttctnggaancntangntntcggagttggggaccgaactcagggccgtgtgcttgctaggcaagcgctctaccagtgagctaaatccncaacccccacagntgcctcntntgattgnaggtntcntatcccnttcttttgtggcaagntcttctgggccccntgaaagtgaanncacntaagnggncgccagctaagnaga

SEQ ID NO: 197 - DNA, 1083 bp, Artificial Sequence
  Description of Artificial Sequence: Note = Synthetic Construct
  misc_feature (6)..(6): n is a, c, g, or t
  misc_feature (20)..(20): n is a, c, g, or t
  misc_feature (26)..(26): n is a, c, g, or t
  misc_feature (30)..(30): n is a, c, g, or t
  misc_feature (44)..(44): n is a, c, g, or t
  misc_feature (52)..(52): n is a, c, g, or t
  misc_feature (64)..(64): n is a, c, g, or t
  misc_feature (73)..(74): n is a, c, g, or t
  misc_feature (81)..(84): n is a, c, g, or t
  misc_feature (87)..(87): n is a, c, g, or t
  misc_feature (92)..(92): n is a, c, g, or t
  misc_feature (96)..(96): n is a, c, g, or t
  misc_feature (115)..(117): n is a, c, g, or t
  misc_feature (119)..(120): n is a, c, g, or t
  misc_feature (124)..(125): n is a, c, g, or t
  misc_feature (143)..(143): n is a, c, g, or t
  misc_feature (145)..(145): n is a, c, g, or t
  misc_feature (147)..(147): n is a, c, g, or t
  misc_feature (158)..(158): n is a, c, g, or t
  misc_feature (165)..(165): n is a, c, g, or t
  misc_feature (193)..(193): n is a, c, g, or t
  misc_feature (223)..(223): n is a, c, g, or t
  misc_feature (245)..(245): n is a, c, g, or t
  misc_feature (259)..(259): n is a, c, g, or t
  misc_feature (271)..(271): n is a, c, g, or t
  misc_feature (273)..(273): n is a, c, g, or t
  misc_feature (349)..(349): n is a, c, g, or t
  misc_feature (354)..(354): n is a, c, g, or t
  misc_feature (397)..(397): n is a, c, g, or t
  misc_feature (409)..(409): n is a, c, g, or t
  misc_feature (759)..(759): n is a, c, g, or t
  misc_feature (1033)..(1033): n is a, c, g, or t
  misc_feature (1050)..(1051): n is a, c, g, or t
  misc_feature (1074)..(1074): n is a, c, g, or t
  misc_feature (1081)..(1081): n is a, c, g, or t
ctcccnggccccaaaaattnttttanaaantttttttttcgggnaaattttnaaaattttaagnggggggaannacaaagnnnnttntgggntggnccaatggggaaaattaagnnnannttgnntggggtgaattcccgccntngnttggaggaggnaattatnttgtagaaatttatggttgtgggggatnttgttaaatcttttgaatgtgttccccttntgtttcccttttgggacatggntcttaataggtggncaaattttaccntnttggaatcagcctatttatcaagattagcccagtgtgctcaaccttgtggaacccctttaacaggatttgcttggnccatntgaaacacagtatttatgtcaggattcataacagtagcaaaantatagttatgangcagcaagaaaatcactttatggttggagcgtcaccacaacatgaggaatgtattaatccgcagtattagagaggtcgagaaccactatcttagaggatgcggtagactgattgcttcccttctcgcttggagttgaccttgccactagagggcaacagcatcagtattgttcccagtccccctcacactgattcgaactttaaggacactgatctctggctggtagagggttcagcacacataccagagttacgagtcacgtgccagaagggcaaactgaacacggaattagagggaactcgatgtctccggcttgcactggtttctcttgcactagaatccttcatcntgctcccagtccgggacgtccaggcaacaagggcgtggaaagtgagggggctgggaggtgtgtttgccttgcctcaggcgctgggtggggttggggcgtgccagcactccctgggcgggcctcaccgatgctggccactataaggccagccagactgcgacacagtccatcccctcgaccactcttttggcgcttcattgtcgacgtgtggtgagctctcactggggcgtccctctaagatctgtccactcctggtttaggggttaagcctttngtgcccctgaaagtttnncacctgtaggtggggcaagctanagagatntt

SEQ ID NO: 198 - DNA, 913 bp, Artificial Sequence
  Description of Artificial Sequence: Note = Synthetic Construct
  misc_feature (13)..(13): n is a, c, g, or t
  misc_feature (18)..(18): n is a, c, g, or t
  misc_feature (25)..(25): n is a, c, g, or t
  misc_feature (42)..(42): n is a, c, g, or t
  misc_feature (55)..(55): n is a, c, g, or t
  misc_feature (64)..(64): n is a, c, g, or t
  misc_feature (75)..(75): n is a, c, g, or t
  misc_feature (78)..(78): n is a, c, g, or t
  misc_feature (83)..(83): n is a, c, g, or t
  misc_feature (108)..(108): n is a, c, g, or t
  misc_feature (111)..(112): n is a, c, g, or t
  misc_feature (122)..(122): n is a, c, g, or t
  misc_feature (125)..(125): n is a, c, g, or t
  misc_feature (141)..(141): n is a, c, g, or t
  misc_feature (157)..(157): n is a, c, g, or t
  misc_feature (189)..(189): n is a, c, g, or t
  misc_feature (197)..(197): n is a, c, g, or t
  misc_feature (199)..(199): n is a, c, g, or t
  misc_feature (222)..(222): n is a, c, g, or t
  misc_feature (225)..(225): n is a, c, g, or t
  misc_feature (232)..(232): n is a, c, g, or t
  misc_feature (238)..(238): n is a, c, g, or t
  misc_feature (241)..(241): n is a, c, g, or t
  misc_feature (331)..(331): n is a, c, g, or t
  misc_feature (364)..(364): n is a, c, g, or t
  misc_feature (368)..(368): n is a, c, g, or t
  misc_feature (380)..(380): n is a, c, g, or t
  misc_feature (384)..(384): n is a, c, g, or t
  misc_feature (570)..(570): n is a, c, g, or t
  misc_feature (586)..(586): n is a, c, g, or t
  misc_feature (593)..(593): n is a, c, g, or t
  misc_feature (855)..(855): n is a, c, g, or t
  misc_feature (882)..(882): n is a, c, g, or t
  misc_feature (886)..(886): n is a, c, g, or t
  misc_feature (895)..(895): n is a, c, g, or t
  misc_feature (897)..(897): n is a, c, g, or t
ggggaaaaaaatntgggnccctttnaaagaaattctggaaanccgccggtggggnatttttaanataggtggggnccnaaaancttgattttcccttttccctttgantgnntaaagttgcnaanttccctttggacgccntttacaagattagccngtgtgtaacctttgggccctttaacaggattncttggccntntgaaacacgtatttatgtcaggnttntaccgtngcaaanttngttttgagcagcaacgaaatcactttatggttggaggtcaccacaacttgaggatgtattaatccgcagtattagagagtcgagaaccantatcttagaggatcggtagactgatgtttcccntttngcttggagttgncttnccactagaggcaacagcatcagtattgttccccagtccccctcacattgattcgaactttaaggacactgatctctggcttggtagagggttcagcacacataccagagttacgagtcacgtgccagaaggcaaactgaacacggaattagagggaactcgatgtctccggcttgcactggtcttntcttgcactagaatcnttcatcntgctcccagtccgggacgtccaggcaacaagggcgtggaaagtgagggggctgggaggtgtgtttgccttgcctcaggcgctgggtggggttggggcgtgccagcactccctgggcgggcctcaccgatgctggccactataaggccagccagactgcgacacagtccatcccctcgccactcttttggcgcttcattgtcgacgtgtggtgagctctcactggggcgtccctctaagatctgtccactcctggtctagggnttaagcctttcctgccctgaaagaccntacntgtaggttngncaagctaaatgagatc

SEQ ID NO: 199 - DNA, 1123 bp, Artificial Sequence
  Description of Artificial Sequence: Note = Synthetic Construct
  misc_feature (5)..(5): n is a, c, g, or t
  misc_feature (8)..(8): n is a, c, g, or t
  misc_feature (37)..(37): n is a, c, g, or t
  misc_feature (49)..(49): n is a, c, g, or t
  misc_feature (51)..(51): n is a, c, g, or t
  misc_feature (59)..(59): n is a, c, g, or t
  misc_feature (62)..(62): n is a, c, g, or t
  misc_feature (81)..(81): n is a, c, g, or t
  misc_feature (85)..(85): n is a, c, g, or t
  misc_feature (99)..(99): n is a, c, g, or t
  misc_feature (103)..(103): n is a, c, g, or t
  misc_feature (109)..(111): n is a, c, g, or t
  misc_feature (117)..(117): n is a, c, g, or t
  misc_feature (129)..(129): n is a, c, g, or t
  misc_feature (137)..(137): n is a, c, g, or t
  misc_feature (140)..(140): n is a, c, g, or t
  misc_feature (145)..(145): n is a, c, g, or t
  misc_feature (148)..(148): n is a, c, g, or t
  misc_feature (167)..(167): n is a, c, g, or t
  misc_feature (204)..(204): n is a, c, g, or t
  misc_feature (211)..(211): n is a, c, g, or t
  misc_feature (217)..(217): n is a, c, g, or t
  misc_feature (226)..(227): n is a, c, g, or t
  misc_feature (240)..(240): n is a, c, g, or t
  misc_feature (261)..(261): n is a, c, g, or t
  misc_feature (270)..(270): n is a, c, g, or t
  misc_feature (275)..(275): n is a, c, g, or t
  misc_feature (284)..(284): n is a, c, g, or t
  misc_feature (290)..(290): n is a, c, g, or t
  misc_feature (297)..(297): n is a, c, g, or t
  misc_feature (302)..(302): n is a, c, g, or t
  misc_feature (317)..(317): n is a, c, g, or t
  misc_feature (320)..(320): n is a, c, g, or t
  misc_feature (351)..(351): n is a, c, g, or t
  misc_feature (367)..(367): n is a, c, g, or t
  misc_feature (375)..(375): n is a, c, g, or t
  misc_feature (396)..(396): n is a, c, g, or t
  misc_feature (442)..(442): n is a, c, g, or t
  misc_feature (475)..(475): n is a, c, g, or t
  misc_feature (506)..(506): n is a, c, g, or t
  misc_feature (525)..(525): n is a, c, g, or t
  misc_feature (614)..(614): n is a, c, g, or t
  misc_feature (626)..(626): n is a, c, g, or t
  misc_feature (650)..(650): n is a, c, g, or t
  misc_feature (662)..(662): n is a, c, g, or t
  misc_feature (664)..(664): n is a, c, g, or t
  misc_feature (675)..(675): n is a, c, g, or t
  misc_feature (692)..(692): n is a, c, g, or t
  misc_feature (696)..(696): n is a, c, g, or t
  misc_feature (726)..(726): n is a, c, g, or t
  misc_feature (757)..(757): n is a, c, g, or t
  misc_feature (760)..(760): n is a, c, g, or t
  misc_feature (822)..(822): n is a, c, g, or t
  misc_feature (825)..(825): n is a, c, g, or t
  misc_feature (843)..(843): n is a, c, g, or t
  misc_feature (1079)..(1079): n is a, c, g, or t
  misc_feature (1095)..(1096): n is a, c, g, or t
  misc_feature (1105)..(1105): n is a, c, g, or t
  misc_feature (1107)..(1107): n is a, c, g, or t
  misc_feature (1111)..(1111): n is a, c, g, or t
acgcnatnttggtggaatttggggggtaaaaattttnaacgaattaggnancttagggnacnaaatccgaaatggggaatngggntaaatttcgaaccntttnggaggnnntaaatntaaaaatgaggntaattggnttngaaangcntatcaggcattccaaattnttaaatttcccttggccagagattggggaaaattttncccggantccagntttaggttnnttggaaaaacggngccccagggattgttgcaccnttcccaatnaaggnggttttccntccaangcctttnggggnaaacccagggggggnttnaggggcccaattcaggaaaaggggaccggantcgggtcccggaaggnttcccggnggggaatcaacccggttcccntccggaggccgggggggacctttaggtttccccttgcaggggtaanatcccctttttcaacccggggggtttgcggggnacgcccctttgccctttcccttcccttgccnggcccgttttgcccaattnggccggtcctaacttgttggcgcaagggacttttggcagccccggccggtttggcggttggactccaagggggtaacagggccaaaccntttggttgaaanaagttaacttgcgcccccagtcangcgtcagtgggnangtgaccccgcntttaggagtttgccccngccnttaggccttgcccccagaggtcgccccacntactagagtgtcgcttggcgcgatgacgtangangacgcaggcgcagtgagtaggcgacgttgggacggcccttggttgtgtcgggggcggaactntgntggctttgagcgccttcnaaacagtaggttgcttggggctctgcggcgtcggaaataaggcggggaggagcaagaaaacagggatcctccagtcgtgtggaccgacccgagtcccgcaccctttttaaggcctgtgttgcggatccgcgcggccatcacgcattgcatcacggttttactgtgtgggaaacgtagccgtccatacctgggtgtagtcagggacctttatggtggctgtcacgcaggcgatttgncaattgaaagactttnncctgtaggnangggnagctaaaaagat

SEQ ID NO: 200 - DNA, 1116 bp, Artificial Sequence
  Description of Artificial Sequence: Note = Synthetic Construct
  misc_feature (13)..(13): n is a, c, g, or t
  misc_feature (19)..(19): n is a, c, g, or t
  misc_feature (24)..(24): n is a, c, g, or t
  misc_feature (28)..(28): n is a, c, g, or t
  misc_feature (34)..(34): n is a, c, g, or t
  misc_feature (40)..(40): n is a, c, g, or t
  misc_feature (69)..(69): n is a, c, g, or t
  misc_feature (72)..(72): n is a, c, g, or t
  misc_feature (91)..(91): n is a, c, g, or t
  misc_feature (96)..(96): n is a, c, g, or t
  misc_feature (99)..(99): n is a, c, g, or t
  misc_feature (101)..(101): n is a, c, g, or t
  misc_feature (111)..(111): n is a, c, g, or t
  misc_feature (128)..(129): n is a, c, g, or t
  misc_feature (137)..(137): n is a, c, g, or t
  misc_feature (149)..(149): n is a, c, g, or t
  misc_feature (165)..(165): n is a, c, g, or t
  misc_feature (182)..(182): n is a, c, g, or t
  misc_feature (196)..(196): n is a, c, g, or t
  misc_feature (210)..(210): n is a, c, g, or t
  misc_feature (219)..(219): n is a, c, g, or t
  misc_feature (224)..(224): n is a, c, g, or t
  misc_feature (229)..(229): n is a, c, g, or t
  misc_feature (234)..(234): n is a, c, g, or t
  misc_feature (245)..(245): n is a, c, g, or t
  misc_feature (254)..(254): n is a, c, g, or t
  misc_feature (269)..(270): n is a, c, g, or t
  misc_feature (282)..(282): n is a, c, g, or t
  misc_feature (302)..(302): n is a, c, g, or t
  misc_feature (306)..(306): n is a, c, g, or t
  misc_feature (312)..(312): n is a, c, g, or t
  misc_feature (325)..(325): n is a, c, g, or t
  misc_feature (328)..(328): n is a, c, g, or t
  misc_feature (366)..(366): n is a, c, g, or t
  misc_feature (386)..(386): n is a, c, g, or t
  misc_feature (418)..(418): n is a, c, g, or t
  misc_feature (437)..(437): n is a, c, g, or t
  misc_feature (472)..(472): n is a, c, g, or t
  misc_feature (483)..(483): n is a, c, g, or t
  misc_feature (508)..(508): n is a, c, g, or t
  misc_feature (527)..(527): n is a, c, g, or t
  misc_feature (531)..(531): n is a, c, g, or t
  misc_feature (541)..(541): n is a, c, g, or t
  misc_feature (564)..(564): n is a, c, g, or t
  misc_feature (579)..(579): n is a, c, g, or t
  misc_feature (589)..(589): n is a, c, g, or t
  misc_feature (606)..(606): n is a, c, g, or t
  misc_feature (610)..(611): n is a, c, g, or t
  misc_feature (625)..(625): n is a, c, g, or t
  misc_feature (636)..(636): n is a, c, g, or t
  misc_feature (656)..(656): n is a, c, g, or t
  misc_feature (663)..(663): n is a, c, g, or t
  misc_feature (692)..(692): n is a, c, g, or t
  misc_feature (696)..(696): n is a, c, g, or t
  misc_feature (721)..(721): n is a, c, g, or t
  misc_feature (772)..(772): n is a, c, g, or t
  misc_feature (1073)..(1073): n is a, c, g, or t
  misc_feature (1088)..(1088): n is a, c, g, or t
  misc_feature (1098)..(1099): n is a, c, g, or t
  misc_feature (1102)..(1102): n is a, c, g, or t
aattttttaaccncccccnttttnaagnttgaanttgcantgcctaggagccctatttttcccccttgnaanttttccccgtaaataaggnaatgntgnanttgtatttancttgcccaaaaaaaacnntgttcttnaatgcaaggtanttgggggttattattntgaaaggcaactaattnttaatggtggattnaacaattttgaagnggattaaanaaaanaaatnattgntttccattggnggtgtgggnttaaaacccttggtnnccagggttccantgggttcaggccctttgagngggntccccnttccccgggaatnggnttgaaccggaaattgaacattttgcacccttttccggnggcccttaaggattgcagcnccagttgcggggaaggggtaattccttgcccnccgtggaaggggtttcagnttccttcccaacccccccccggccgggagtccggnggggcggtttntttcaccttaagggcgggcgtgganttaaattaagcgccggggngggntcccaagccntccggcccggctttggttccttntgggcgccgggggcnaacggccccnggggctttgggcggttntccnnccggccaaccgggncccgtggttgntgggttaggccagtgcaccnggagttnccgggggcaaccaaatgtccaggacttangctntgcaaggagtttgggataggactcntacaatggtccctccctccgtttgcccccgaggccctttgggagctggttnatcccagaactcagtgagtcactctcatgaagcacggttggctgctttggaatgctgggcaaccccagaacacagtgctgtactagtacacacacacacacacacacacacacacacgttacacatgctgacacaaacatgaaaatgcagtcaacggcaggcagagatggatggatgcacattgctgtggaatggtacactttgcacctcacactcttccagagggacagtccatacaacactcagcttcgcttcccactataggcttcacatgaccagctcttcagcgtcggaaaggacngtactgaaagacttnacctgtaggnnggncagctaaaaagatc

SEQ ID NO: 201 - DNA, 900 bp, Artificial Sequence; identical to SEQ ID NO: 72
  Description of Artificial Sequence: Note = Synthetic Construct
  misc_feature (4)..(4): n is a, c, g, or t
  misc_feature (8)..(8): n is a, c, g, or t
  misc_feature (21)..(21): n is a, c, g, or t
  misc_feature (24)..(24): n is a, c, g, or t
  misc_feature (28)..(30): n is a, c, g, or t
  misc_feature (39)..(39): n is a, c, g, or t
  misc_feature (54)..(54): n is a, c, g, or t
  misc_feature (57)..(57): n is a, c, g, or t
  misc_feature (69)..(69): n is a, c, g, or t
  misc_feature (72)..(72): n is a, c, g, or t
  misc_feature (74)..(74): n is a, c, g, or t
  misc_feature (85)..(87): n is a, c, g, or t
  misc_feature (91)..(91): n is a, c, g, or t
  misc_feature (99)..(99): n is a, c, g, or t
  misc_feature (103)..(105): n is a, c, g, or t
  misc_feature (112)..(112): n is a, c, g, or t
  misc_feature (120)..(120): n is a, c, g, or t
  misc_feature (125)..(125): n is a, c, g, or t
  misc_feature (142)..(142): n is a, c, g, or t
  misc_feature (147)..(147): n is a, c, g, or t
  misc_feature (161)..(161): n is a, c, g, or t
  misc_feature (168)..(168): n is a, c, g, or t
  misc_feature (179)..(180): n is a, c, g, or t
  misc_feature (187)..(188): n is a, c, g, or t
  misc_feature (198)..(198): n is a, c, g, or t
  misc_feature (207)..(207): n is a, c, g, or t
  misc_feature (209)..(210): n is a, c, g, or t
  misc_feature (212)..(212): n is a, c, g, or t
  misc_feature (215)..(215): n is a, c, g, or t
  misc_feature (221)..(221): n is a, c, g, or t
  misc_feature (223)..(223): n is a, c, g, or t
  misc_feature (225)..(225): n is a, c, g, or t
  misc_feature (227)..(227): n is a, c, g, or t
  misc_feature (249)..(250): n is a, c, g, or t
  misc_feature (278)..(278): n is a, c, g, or t
  misc_feature (284)..(284): n is a, c, g, or t
  misc_feature (290)..(290): n is a, c, g, or t
  misc_feature (298)..(298): n is a, c, g, or t
  misc_feature (305)..(305): n is a, c, g, or t
  misc_feature (307)..(308): n is a, c, g, or t
  misc_feature (352)..(352): n is a, c, g, or t
  misc_feature (354)..(354): n is a, c, g, or t
  misc_feature (356)..(356): n is a, c, g, or t
  misc_feature (359)..(359): n is a, c, g, or t
  misc_feature (362)..(362): n is a, c, g, or t
  misc_feature (364)..(364): n is a, c, g, or t
  misc_feature (380)..(380): n is a, c, g, or t
  misc_feature (382)..(382): n is a, c, g, or t
  misc_feature (391)..(391): n is a, c, g, or t
  misc_feature (396)..(397): n is a, c, g, or t
  misc_feature (400)..(400): n is a, c, g, or t
  misc_feature (403)..(404): n is a, c, g, or t
  misc_feature (406)..(406): n is a, c, g, or t
  misc_feature (412)..(412): n is a, c, g, or t
  misc_feature (431)..(431): n is a, c, g, or t
  misc_feature (449)..(450): n is a, c, g, or t
  misc_feature (452)..(452): n is a, c, g, or t
  misc_feature (456)..(456): n is a, c, g, or t
  misc_feature (460)..(460): n is a, c, g, or t
  misc_feature (478)..(478): n is a, c, g, or t
  misc_feature (487)..(487): n is a, c, g, or t
  misc_feature (491)..(491): n is a, c, g, or t
  misc_feature (494)..(494): n is a, c, g, or t
  misc_feature (497)..(497): n is a, c, g, or t
  misc_feature (501)..(501): n is a, c, g, or t
  misc_feature (504)..(504): n is a, c, g, or t
  misc_feature (508)..(508): n is a, c, g, or t
  misc_feature (513)..(513): n is a, c, g, or t
  misc_feature (517)..(517): n is a, c, g, or t
  misc_feature (526)..(528): n is a, c, g, or t
  misc_feature (530)..(530): n is a, c, g, or t
  misc_feature (544)..(544): n is a, c, g, or t
  misc_feature (554)..(554): n is a, c, g, or t
  misc_feature (559)..(559): n is a, c, g, or t
  misc_feature (563)..(563): n is a, c, g, or t
  misc_feature (568)..(568): n is a, c, g, or t
  misc_feature (572)..(572): n is a, c, g, or t
  misc_feature (574)..(577): n is a, c, g, or t
  misc_feature (584)..(584): n is a, c, g, or t
  misc_feature (588)..(588): n is a, c, g, or t
  misc_feature (596)..(596): n is a, c, g, or t
  misc_feature (607)..(607): n is a, c, g, or t
  misc_feature (621)..(621): n is a, c, g, or t
  misc_feature (626)..(626): n is a, c, g, or t
  misc_feature (630)..(630): n is a, c, g, or t
  misc_feature (641)..(641): n is a, c, g, or t
  misc_feature (643)..(643): n is a, c, g, or t
  misc_feature (652)..(653): n is a, c, g, or t
  misc_feature (655)..(655): n is a, c, g, or t
  misc_feature (664)..(664): n is a, c, g, or t
  misc_feature (671)..(671): n is a, c, g, or t
  misc_feature (678)..(678): n is a, c, g, or t
  misc_feature (681)..(681): n is a, c, g, or t
  misc_feature (685)..(685): n is a, c, g, or t
  misc_feature (690)..(690): n is a, c, g, or t
  misc_feature (704)..(704): n is a, c, g, or t
  misc_feature (713)..(714): n is a, c, g, or t
  misc_feature (716)..(716): n is a, c, g, or t
  misc_feature (718)..(718): n is a, c, g, or t
  misc_feature (747)..(747): n is a, c, g, or t
  misc_feature (749)..(749): n is a, c, g, or t
  misc_feature (757)..(757): n is a, c, g, or t
  misc_feature (759)..(759): n is a, c, g, or t
  misc_feature (783)..(783): n is a, c, g, or t
  misc_feature (792)..(792): n is a, c, g, or t
  misc_feature (823)..(823): n is a, c, g, or t
  misc_feature (825)..(825): n is a, c, g, or t
  misc_feature (833)..(833): n is a, c, g, or t
  misc_feature (842)..(842): n is a, c, g, or t
  misc_feature (845)..(845): n is a, c, g, or t
  misc_feature (847)..(847): n is a, c, g, or t
  misc_feature (853)..(853): n is a, c, g, or t
  misc_feature (870)..(870): n is a, c, g, or t

SEQ ID NO: 202 - DNA, 498 bp, Artificial Sequence
  Description of Artificial Sequence: Note = Synthetic Construct
  misc_feature (435)..(435): n is a, c, g, or t
  misc_feature (454)..(454): n is a, c, g, or t
  misc_feature (480)..(480): n is a, c, g, or t
  misc_feature (483)..(483): n is a, c, g, or t
  misc_feature (485)..(485): n is a, c, g, or t
  misc_feature (495)..(495): n is a, c, g, or t
atgttgtgtggaattgtgagcggataacaatttcacacagaattcagaaggatctcagaaattgaaagcatgtgcaaagataaagatttggggtagtagtagtggtcaaaagggacaaggtaataatggtaatatgcttttgtgtatgtgttcttttagagttatgttaaaatctagagaagcaaagtcgattctcatagatgcttttagtctttggaccctgactagagacagtttacaccctagacaagagagagaatggggttgagtaaaacagtcctcccgaactctccacagatgctttggcaaaagaaggaaatgagcttaaactttttggagctctcctgggaacagaaggaggtgggagacgtcttgcctccttgctgctcctattggagaagtgcttatttctggttctgggttttttaggtaggntgtctgggtccctttggtntgaaagaccttacctgtaggtttggncgntngaaaagatcntgg

SEQ ID NO: 203 - DNA, 380 bp, Artificial Sequence
  Description of Artificial Sequence: Note = Synthetic Construct
  misc_feature (7)..(7): n is a, c, g, or t
  misc_feature (20)..(20): n is a, c, g, or t
  misc_feature (26)..(26): n is a, c, g, or t
  misc_feature (61)..(61): n is a, c, g, or t
  misc_feature (70)..(70): n is a, c, g, or t
  misc_feature (73)..(73): n is a, c, g, or t
  misc_feature (87)..(87): n is a, c, g, or t
  misc_feature (112)..(112): n is a, c, g, or t
  misc_feature (142)..(142): n is a, c, g, or t
  misc_feature (147)..(147): n is a, c, g, or t
  misc_feature (155)..(155): n is a, c, g, or t
  misc_feature (160)..(160): n is a, c, g, or t
  misc_feature (166)..(167): n is a, c, g, or t
  misc_feature (177)..(177): n is a, c, g, or t
  misc_feature (182)..(182): n is a, c, g, or t
  misc_feature (189)..(189): n is a, c, g, or t
  misc_feature (204)..(204): n is a, c, g, or t
  misc_feature (229)..(230): n is a, c, g, or t
  misc_feature (233)..(234): n is a, c, g, or t
  misc_feature (250)..(250): n is a, c, g, or t
  misc_feature (252)..(252): n is a, c, g, or t
  misc_feature (255)..(256): n is a, c, g, or t
  misc_feature (271)..(271): n is a, c, g, or t
  misc_feature (282)..(282): n is a, c, g, or t
  misc_feature (300)..(300): n is a, c, g, or t
  misc_feature (320)..(320): n is a, c, g, or t
  misc_feature (334)..(334): n is a, c, g, or t
  misc_feature (337)..(337): n is a, c, g, or t
  misc_feature (351)..(351): n is a, c, g, or t
  misc_feature (354)..(354): n is a, c, g, or t
  misc_feature (371)..(371): n is a, c, g, or t
aatgggnggtttccgaaaanaacgcnaaaaaaaaagttagggaatttggggaattaagaanccgggaacntgnaaacattgaccaancttgttttaattaccggtttggggnaaaaggggcaaccccaaaggggaagggaanggaanggaaaatnaattncctttnnaaaaaggagnaaatncgggtanggaaaattccggtgnggggttttcaaaggtccccccccgnnggnntaaaaaattgaagttnantcnngggggggaacccaanagaatataaanaaaccggggtttcccccngggagttccttgggggtttnccggttcgacccgncgnttaccggaaacctntcncctttttcccttggggnagggggggg

SEQ ID NO: 204 - DNA, 998 bp, Artificial Sequence
  Description of Artificial Sequence: Note = Synthetic Construct
  misc_feature (536)..(536): n is a, c, g, or t
  misc_feature (623)..(623): n is a, c, g, or t
  misc_feature (632)..(633): n is a, c, g, or t
  misc_feature (727)..(727): n is a, c, g, or t
  misc_feature (759)..(759): n is a, c, g, or t
  misc_feature (837)..(837): n is a, c, g, or t
  misc_feature (842)..(842): n is a, c, g, or t
  misc_feature (916)..(916): n is a, c, g, or t
  misc_feature (944)..(944): n is a, c, g, or t
  misc_feature (947)..(947): n is a, c, g, or t
  misc_feature (968)..(969): n is a, c, g, or t
  misc_feature (991)..(991): n is a, c, g, or t
  misc_feature (994)..(994): n is a, c, g, or t
acatgtacacaactgggtcccagccaagtcaggttccagctgccagcagaggcctggagctagcttcgcgtgcactaccaccctgcccaacctggcactgtgcccattgacttcggggggccgggggcaggaggtacccacctccccaccctcctcttccctcctctcaggagcttatctatcggtgagcagcaagtaggaaaaggtaagctgagaaagagcacttggctggctacaggacctcagcctgaggtgtgaaacaggagactgggcactggggaaacagcagcactggctgggccaaaggggagggaggaaggcaatgaatgggcaagcctgtgccttacagaaacagactcccttgggctgggtgctggaatcctaacccctcagtgatgggggaactctgctccagtgagctgaagtatacatgtggggaattggggggtggggtagggggaaggcaatccaaaggtcactcccctgacctagttggaccacagttaattaaggctcccaagccctgctgactcttnacgtctggtttctggaaagaagggagttaatcagcaaacaatttaagaaaggtataactgtctacccctgcagaggatcatgggttncctctctanncttctgagccgtggatctcagccaaaaacaaaaaccaaaacaaagaaacaaacgcctatttaaaagggggttggagttgggcaggggtgaggtngttagatcatctgagagctccaggacacgcanatagttgaagaggaaaccaagatccaaatgtcttctgacatcacacgggatgcagcagcacaccaacatatactttancctcnccagagaggaaaacaaccgcctagttaataagcagagttgggctgttggcaaaccgtcattccagatctgaggnaagttggatggttcgggtgtctatgttnacntaagacctgttttacaagctnntatgggcaagggctttggttcnagnaagg

SEQ ID NO: 205 - DNA, 970 bp, Artificial Sequence
  Description of Artificial Sequence: Note = Synthetic Construct
  misc_feature (7)..(7): n is a, c, g, or t
  misc_feature (16)..(17): n is a, c, g, or t
  misc_feature (39)..(40): n is a, c, g, or t
  misc_feature (43)..(43): n is a, c, g, or t
  misc_feature (49)..(49): n is a, c, g, or t
  misc_feature (52)..(52): n is a, c, g, or t
  misc_feature (84)..(84): n is a, c, g, or t
  misc_feature (91)..(91): n is a, c, g, or t
  misc_feature (104)..(104): n is a, c, g, or t
  misc_feature (129)..(129): n is a, c, g, or t
  misc_feature (166)..(166): n is a, c, g, or t
  misc_feature (175)..(175): n is a, c, g, or t
  misc_feature (181)..(181): n is a, c, g, or t
  misc_feature (186)..(186): n is a, c, g, or t
  misc_feature (191)..(191): n is a, c, g, or t
  misc_feature (201)..(201): n is a, c, g, or t
  misc_feature (204)..(204): n is a, c, g, or t
  misc_feature (225)..(225): n is a, c, g, or t
  misc_feature (245)..(245): n is a, c, g, or t
  misc_feature (247)..(247): n is a, c, g, or t
  misc_feature (250)..(250): n is a, c, g, or t
  misc_feature (264)..(264): n is a, c, g, or t
  misc_feature (269)..(269): n is a, c, g, or t
  misc_feature (283)..(283): n is a, c, g, or t
  misc_feature (297)..(298): n is a, c, g, or t
  misc_feature (303)..(303): n is a, c, g, or t
  misc_feature (321)..(321): n is a, c, g, or t
  misc_feature (330)..(330): n is a, c, g, or t
  misc_feature (332)..(332): n is a, c, g, or t
  misc_feature (340)..(340): n is a, c, g, or t
  misc_feature (343)..(343): n is a, c, g, or t
  misc_feature (351)..(351): n is a, c, g, or t
  misc_feature (354)..(354): n is a, c, g, or t
  misc_feature (364)..(364): n is a, c, g, or t
  misc_feature (374)..(374): n is a, c, g, or t
  misc_feature (393)..(393): n is a, c, g, or t
  misc_feature (405)..(405): n is a, c, g, or t
  misc_feature (409)..(409): n is a, c, g, or t
  misc_feature (414)..(414): n is a, c, g, or t
  misc_feature (421)..(421): n is a, c, g, or t
  misc_feature (452)..(452): n is a, c, g, or t
  misc_feature (497)..(497): n is a, c, g, or t
  misc_feature (501)..(501): n is a, c, g, or t
  misc_feature (510)..(510): n is a, c, g, or t
  misc_feature (513)..(513): n is a, c, g, or t
  misc_feature (523)..(523): n is a, c, g, or t
  misc_feature (577)..(577): n is a, c, g, or t
  misc_feature (585)..(585): n is a, c, g, or t
  misc_feature (635)..(635): n is a, c, g, or t
  misc_feature (637)..(637): n is a, c, g, or t
  misc_feature (640)..(640): n is a, c, g, or t
  misc_feature (645)..(645): n is a, c, g, or t
  misc_feature (647)..(647): n is a, c, g, or t
  misc_feature (703)..(703): n is a, c, g, or t
  misc_feature (939)..(939): n is a, c, g, or t
  misc_feature (946)..(946): n is a, c, g, or t
  misc_feature (952)..(952): n is a, c, g, or t
ccggtcnccgaaggannttgaaccttcccggtttttaannaanacccgnatnttcgggattgggtttttaacggctttttttanaaggccnagatacccttttnatggcctttattcccttccgttttnttcccccccttcaatttggaagtttggtttgccgaantttaagttnttgtcntcctncgttntttttttccnttnttttttcccaaaagtaacaanccggtattggtttccaaggntnttnttgaacccgtaatngcggntttccggttaaccnagggtttgttcctnngccgnttcctccaatttttggantttcccagntnggggtccnttntcttgttnacngttccaaacntaattgacanttaatttttcctgtgtaanttgtccccgganattntgggntcttggngcagggccttttttcattggaagcaaccccntaaatttttaccaggcttgattgtttaggaagtaatccttgcttngaanccccacttnttntttccaaggntggaaaccaggattttggaactgcagaggcttcagggtctgggaagcggagcangcaaagantggagtgcactgtccttttgcaatatggggtttgcttgcttgctggctcntntcntgctntntcagatggtgactgaggctacttcagcaggactaggaataatcatgtccaggtggntgcccttccgagcagaaagggacagacgtggggcgatgaagttgctatcgtttttttttttttctgcacagactgcaaagtgtgcagagggagggaggctgtgcaaaaaaaaaaaaaaaaaaaaaaaaaaaaaaaaccgaggacgcagaagttagactgctgacccatttggtgcatgtgtgcccatggagggaggggaccttctcaaaagggttcacgcagcaagcattgaaagnttccacntgtagngtcgcaagcaactgagat

SEQ ID NO: 206 - DNA, 884 bp, Artificial Sequence
  Description of Artificial Sequence: Note = Synthetic Construct
  misc_feature (1)..(1): n is a, c, g, or t
  misc_feature (80)..(80): n is a, c, g, or t
  misc_feature (581)..(581): n is a, c, g, or t
  misc_feature (613)..(613): n is a, c, g, or t
  misc_feature (639)..(639): n is a, c, g, or t
  misc_feature (655)..(655): n is a, c, g, or t
  misc_feature (657)..(657): n is a, c, g, or t
  misc_feature (662)..(662): n is a, c, g, or t
  misc_feature (673)..(673): n is a, c, g, or t
  misc_feature (677)..(677): n is a, c, g, or t
  misc_feature (681)..(682): n is a, c, g, or t
  misc_feature (689)..(690): n is a, c, g, or t
  misc_feature (693)..(693): n is a, c, g, or t
  misc_feature (696)..(696): n is a, c, g, or t
  misc_feature (699)..(699): n is a, c, g, or t
  misc_feature (710)..(710): n is a, c, g, or t
  misc_feature (719)..(720): n is a, c, g, or t
  misc_feature (738)..(738): n is a, c, g, or t
  misc_feature (759)..(760): n is a, c, g, or t
  misc_feature (769)..(769): n is a, c, g, or t
  misc_feature (782)..(782): n is a, c, g, or t
  misc_feature (785)..(787): n is a, c, g, or t
  misc_feature (792)..(792): n is a, c, g, or t
  misc_feature (794)..(794): n is a, c, g, or t
  misc_feature (796)..(796): n is a, c, g, or t
  misc_feature (802)..(802): n is a, c, g, or t
  misc_feature (805)..(806): n is a, c, g, or t
  misc_feature (814)..(814): n is a, c, g, or t
  misc_feature (818)..(818): n is a, c, g, or t
  misc_feature (820)..(822): n is a, c, g, or t
  misc_feature (826)..(826): n is a, c, g, or t
  misc_feature (830)..(830): n is a, c, g, or t
  misc_feature (833)..(833): n is a, c, g, or t
  misc_feature (836)..(836): n is a, c, g, or t
  misc_feature (858)..(858): n is a, c, g, or t
  misc_feature (860)..(860): n is a, c, g, or t
  misc_feature (862)..(862): n is a, c, g, or t
ngggcccccctcgaggtcgacggtatcgataagcttgagggacccacgtgatggaaagggagaagcaatttagtgtcctntgtcctctgacctccacaagtgctgtggcatggggacacaggactgtacacacacacacacacacacacacacacacacacacacacgcacgcacacacacccctcaagtaaccgtggaataaaggtccgaccagaaaccacgctggaacgggagatgctggagcacatcagggtggtgctaagcagcagatcggcctgtaactggcagcagaggggtgtggctctttcagaaccaggagggcatcgcccctccagccagactctccagctttcttcccctccttgcctcctgttttccttctgcctaccttcctttggcctcaaaccataatgtgcaacacattcaaactgtagtaagtgttttaattttctactaaacaataaaacctttagattttcactgggccagtgctggtaacagcagactgggtggagtatcacagagggtgtggagcaagctggctacccagggctgggcacactcaacactctggcattcngtggaagttctgggcagtaaaaacagaagcanacgtcacgcacaggttccatagtgtnaggcatcttaatctancnagaanacctggtgttnagtntgtnnacaaaanngantgntgnacttggacagnggtgttttnntcccagggcttccagganttaggggtataccaggcccannacattgggnaaacgtgtgtgtnaannntttcntntnaaaccnccnnggttgacnactngnnntccntttnaanggncccagttccccttggggggttngntntggaaaaaggctttccggtttc

SEQ ID NO: 207 - DNA, 855 bp, Artificial Sequence
  Description of Artificial Sequence: Note = Synthetic Construct
  misc_feature (19)..(19): n is a, c, g, or t
  misc_feature (22)..(22): n is a, c, g, or t
  misc_feature (28)..(28): n is a, c, g, or t
  misc_feature (36)..(36): n is a, c, g, or t
  misc_feature (38)..(38): n is a, c, g, or t
  misc_feature (40)..(40): n is a, c, g, or t
  misc_feature (59)..(59): n is a, c, g, or t
  misc_feature (66)..(66): n is a, c, g, or t
  misc_feature (82)..(82): n is a, c, g, or t
  misc_feature (91)..(91): n is a, c, g, or t
  misc_feature (101)..(101): n is a, c, g, or t
  misc_feature (107)..(107): n is a, c, g, or t
  misc_feature (116)..(116): n is a, c, g, or t
  misc_feature (120)..(120): n is a, c, g, or t
  misc_feature (122)..(122): n is a, c, g, or t
  misc_feature (130)..(130): n is a, c, g, or t
  misc_feature (134)..(134): n is a, c, g, or t
  misc_feature (142)..(142): n is a, c, g, or t
  misc_feature (161)..(161): n is a, c, g, or t
  misc_feature (163)..(163): n is a, c, g, or t
  misc_feature (193)..(193): n is a, c, g, or t
  misc_feature (239)..(239): n is a, c, g, or t
  misc_feature (291)..(291): n is a, c, g, or t
  misc_feature (308)..(308): n is a, c, g, or t
  misc_feature (312)..(312): n is a, c, g, or t
  misc_feature (321)..(321): n is a, c, g, or t
  misc_feature (335)..(335): n is a, c, g, or t
  misc_feature (337)..(337): n is a, c, g, or t
  misc_feature (352)..(352): n is a, c, g, or t
  misc_feature (453)..(453): n is a, c, g, or t
  misc_feature (476)..(476): n is a, c, g, or t
  misc_feature (518)..(518): n is a, c, g, or t
  misc_feature (590)..(590): n is a, c, g, or t
  misc_feature (592)..(592): n is a, c, g, or t
  misc_feature (600)..(600): n is a, c, g, or t
ccccttccggggggtttanaanggaatnaatgggtntntnccagggggggaaacccttnaccgcgngcctttcggaattttngtccaccgnaaaaaatttnccatgngcaccatgnaagntnacgagggnattnggggttanagttttggagtgggccaanangaacatggaggaatatttgttttggtttgngaaccataccttggaaagattgtatttttatccgccaacaaccacngtggtagggtgtttttttgtttgcagcagcagataagggcagaaaaaagatntcagagatcctttgatntttnttcggggtngacgttcatgttgngnggattgggagcgganaacaatttcacacagcaaggagaggagccaatatagaggggaaaaaaaaagaaggggaaagcagttagtttaaaaagttgagagaacaaagtatgttttgnttggatgggcaaccaaagaagcntgccaggaatggtcggtaaaaggtgtaagagtcatgaaagtnttctgtccaaccgttaccggaaacatgcaaggaatttcttagactggccaggattggattgtgggaaaggtntnttcaagcntccccttggcttttatggcaagaaaatagtgcggactatagagagcgtcgttctcaaagctttccccaatagcagaaaagcattgtcctaaattccctaaaaggcaccgtgaaataaatattacgggacacgatggcacaagaaggagctttcaactctgccaccagaacagttatacttcatagtaaccatgttgccctgttcaatgacaaggcacgctctccagcagaaagggaaaaggagctgagttcgcac

SEQ ID NO: 208 - DNA, 1059 bp, Artificial Sequence
  Description of Artificial Sequence: Note = Synthetic Construct
  misc_feature (38)..(38): n is a, c, g, or t
  misc_feature (42)..(44): n is a, c, g, or t
  misc_feature (61)..(61): n is a, c, g, or t
  misc_feature (65)..(65): n is a, c, g, or t
  misc_feature (81)..(82): n is a, c, g, or t
  misc_feature (86)..(86): n is a, c, g, or t
  misc_feature (97)..(97): n is a, c, g, or t
  misc_feature (101)..(101): n is a, c, g, or t
  misc_feature (104)..(104): n is a, c, g, or t
  misc_feature (111)..(111): n is a, c, g, or t
  misc_feature (115)..(115): n is a, c, g, or t
  misc_feature (117)..(117): n is a, c, g, or t
  misc_feature (138)..(138): n is a, c, g, or t
  misc_feature (153)..(153): n is a, c, g, or t
  misc_feature (156)..(156): n is a, c, g, or t
  misc_feature (169)..(170): n is a, c, g, or t
  misc_feature (181)..(181): n is a, c, g, or t
  misc_feature (184)..(184): n is a, c, g, or t
  misc_feature (203)..(203): n is a, c, g, or t
  misc_feature (218)..(218): n is a, c, g, or t
  misc_feature (224)..(224): n is a, c, g, or t
  misc_feature (237)..(237): n is a, c, g, or t
  misc_feature (271)..(271): n is a, c, g, or t
  misc_feature (277)..(277): n is a, c, g, or t
  misc_feature (285)..(285): n is a, c, g, or t
  misc_feature (302)..(302): n is a, c, g, or t
  misc_feature (318)..(318): n is a, c, g, or t
  misc_feature (335)..(335): n is a, c, g, or t
  misc_feature (340)..(340): n is a, c, g, or t
  misc_feature (360)..(360): n is a, c, g, or t
  misc_feature (364)..(364): n is a, c, g, or t
  misc_feature (366)..(366): n is a, c, g, or t
  misc_feature (410)..(410): n is a, c, g, or t
  misc_feature (1010)..(1010): n is a, c, g, or t
  misc_feature (1024)..(1025): n is a, c, g, or t
  misc_feature (1039)..(1039): n is a, c, g, or t
  misc_feature (1056)..(1056): n is a, c, g, or t
caatttttaaaaaaaagaatttgggtttaatccaaaanttgnnncaaaaattggttgaccntttnaaccccaaaaccatgnnttgncctttcccctnaccngtnatagtgnttgnantgtaacccaacaatcaacggntatttgttcaggganttnttggtaccaggcnnttggttttganaanacggtaggtccgggaagcnttgacggtaagcccngggganaagggccaacggngatcccaaattaggagcttgacgcattgttttcntttgcntggaatgncattcttctcttctccntttatctagaaaacgnttactcatgcttcaaanccacngttgacttccccagcattgnttcncntagctccttctttgaaacaactgattgggaaatcaggaggatangaaaagctttaacaagagctttcaggggctttcggagagaactcattcttgtaggacgcaggccatgcaagcatcaggctctgccttctggaccccagtatacagacatatgcacaactgcagtggttcatacttgtaatcccagtgttaggaagacttagacttggagcttgctggtcagactggtaagcccagttcagtgagaccctgacttaaaaatgaagttggaaagaaatttggaaagataatctggtattcatctctgggctctatttgcacaggcacacacacaaatataccaatataacatacacagaaagagaaggggagggaggaagagagggagggcggtagagaacttgtgaatgtcttttgataggtttttttttaagttattggattaaaccatcagcagtgtcacattggttaagttaaaaataataaaatgaagcaacttatctttgctgaaattcattactcattatgagagtttgataaaaaaaaagaggagtctcccacagttttcctgtctcatcttttactccaggggacggtcacactattcagtaagatacctaggctatctggctcactggactnggcgtgaaagactnnacctgtaggtttgngcgctgaaaagatcttnaac

SEQ ID NO: 209 - DNA, 1042 bp, Artificial Sequence
  Description of Artificial Sequence: Note = Synthetic Construct
  misc_feature (5)..(5): n is a, c, g, or t
  misc_feature (7)..(7): n is a, c, g, or t
  misc_feature (15)..(15): n is a, c, g, or t
  misc_feature (27)..(27): n is a, c, g, or t
  misc_feature (33)..(33): n is a, c, g, or t
  misc_feature (38)..(38): n is a, c, g, or t
  misc_feature (49)..(49): n is a, c, g, or t
  misc_feature (54)..(54): n is a, c, g, or t
  misc_feature (56)..(56): n is a, c, g, or t
  misc_feature (70)..(71): n is a, c, g, or t
  misc_feature (94)..(94): n is a, c, g, or t
  misc_feature (96)..(96): n is a, c, g, or t
  misc_feature (108)..(108): n is a, c, g, or t
  misc_feature (115)..(115): n is a, c, g, or t
  misc_feature (129)..(129): n is a, c, g, or t
  misc_feature (131)..(131): n is a, c, g, or t
  misc_feature (136)..(137): n is a, c, g, or t
  misc_feature (141)..(141): n is a, c, g, or t
  misc_feature (153)..(153): n is a, c, g, or t
  misc_feature (161)..(161): n is a, c, g, or t
  misc_feature (166)..(167): n is a, c, g, or t
  misc_feature (179)..(179): n is a, c, g, or t
  misc_feature (217)..(217): n is a, c, g, or t
  misc_feature (247)..(247): n is a, c, g, or t
  misc_feature (266)..(266): n is a, c, g, or t
  misc_feature (303)..(303): n is a, c, g, or t
  misc_feature (377)..(377): n is a, c, g, or t
  misc_feature (386)..(386): n is a, c, g, or t
  misc_feature (418)..(418): n is a, c, g, or t
  misc_feature (493)..(493): n is a, c, g, or t
  misc_feature (584)..(584): n is a, c, g, or t
  misc_feature (663)..(663): n is a, c, g, or t
  misc_feature (695)..(695): n is a, c, g, or t
  misc_feature (769)..(769): n is a, c, g, or t
  misc_feature (936)..(936): n is a, c, g, or t
  misc_feature (982)..(982): n is a, c, g, or t
  misc_feature (994)..(994): n is a, c, g, or t
  misc_feature (1003)..(1003): n is a, c, g, or t
aaacncnttctgaanccccaaatcctnagaatnttttnaaaatcccccnggggngnagccaaatttaacnnttttttccaagagcatgaacagngngattcttggganagctttngggttccctttttntnaatcnncatngagggttctaantgaacctnaaggnnatttaacttttnatggaacaaacccgttggtgtgtcccctccttggaganttgagttggaacttaaaaaaaacctttccnaaaaattgtgtaatctgantccaaacccaaatgaggacaaatccagtgtaggaggnatttaggcaaattaaactgacttggtcaactttctgaaaatgatgtcttgatttcaggaaggatccccagtgcntcggggacntgaaagggagatgtaacccttgagctcatggntaggaagggaaatcttagagacagcttggtaaaatctgagtgaggttgagaggttggaggaccacattgtgtatntgctcatccctgtgagggagagacttgtactctgctcttgagaaggcagaactgttaggcagacacttagagaatatatgtcatggcaaangacatccacccaacaagtcttcagtaacaaagcactaaacagaaaggggttgaagagacttggtcagtggcatgagagnttttattgctcttacagaggactcggcatgcntagcagctcacaacagcctgtgacttcaacactatgcctcttggcctcaggagacacctgtgtactcccacccngacacatatacttaaaaataaaagaaatcttttaaacattgagcaaatgtaatcaggtactaacattgaatatatctggggccaggaattattctggtttattgcctttttcggaagcctaatatcacacatagagaaataggcagcacaggcctaacagcccatantgtgtgctattctatcaatagtgccaagtattgacatggactattnttaaggccaaangagaggtcnccagaaagttatacatgtaggttggcgcgctgaaaggat

SEQ ID NO: 210 - DNA, 960 bp, Artificial Sequence
  Description of Artificial Sequence: Note = Synthetic Construct
  misc_feature (6)..(7): n is a, c, g, or t
  misc_feature (11)..(11): n is a, c, g, or t
  misc_feature (15)..(15): n is a, c, g, or t
  misc_feature (18)..(19): n is a, c, g, or t
  misc_feature (31)..(31): n is a, c, g, or t
  misc_feature (33)..(33): n is a, c, g, or t
  misc_feature (36)..(36): n is a, c, g, or t
  misc_feature (41)..(41): n is a, c, g, or t
  misc_feature (43)..(43): n is a, c, g, or t
  misc_feature (53)..(53): n is a, c, g, or t
  misc_feature (57)..(57): n is a, c, g, or t
  misc_feature (60)..(60): n is a, c, g, or t
  misc_feature (68)..(68): n is a, c, g, or t
  misc_feature (71)..(71): n is a, c, g, or t
  misc_feature (78)..(79): n is a, c, g, or t
  misc_feature (91)..(91): n is a, c, g, or t
  misc_feature (97)..(97): n is a, c, g, or t
  misc_feature (100)..(100): n is a, c, g, or t
  misc_feature (106)..(106): n is a, c, g, or t
  misc_feature (116)..(116): n is a, c, g, or t
  misc_feature (121)..(121): n is a, c, g, or t
  misc_feature (125)..(125): n is a, c, g, or t
  misc_feature (138)..(138): n is a, c, g, or t
  misc_feature (143)..(143): n is a, c, g, or t
  misc_feature (151)..(151): n is a, c, g, or t
  misc_feature (155)..(156): n is a, c, g, or t
  misc_feature (160)..(160): n is a, c, g, or t
  misc_feature (176)..(176): n is a, c, g, or t
  misc_feature (209)..(209): n is a, c, g, or t
  misc_feature (216)..(216): n is a, c, g, or t
  misc_feature (248)..(248): n is a, c, g, or t
  misc_feature (258)..(258): n is a, c, g, or t
  misc_feature (267)..(267): n is a, c, g, or t
  misc_feature (299)..(299): n is a, c, g, or t
  misc_feature (314)..(314): n is a, c, g, or t
  misc_feature (395)..(395): n is a, c, g, or t
  misc_feature (423)..(423): n is a, c, g, or t
  misc_feature (426)..(426): n is a, c, g, or t
  misc_feature (447)..(447): n is a, c, g, or t
  misc_feature (459)..(459): n is a, c, g, or t
  misc_feature (461)..(461): n is a, c, g, or t
  misc_feature (922)..(922): n is a, c, g, or t
  misc_feature (938)..(939): n is a, c, g, or t
  misc_feature (955)..(955): n is a, c, g, or t
ggcccnnaatnaaanggnnggttgaaccccntnttngacangntgcccaaaantacnggnaaccattnccnaaatttnnaagtgtgggatnaaggcntgncccatnatcctccctnttgantgcncccaaagtaaagnccaanttgagggngganntttnttgaaacgtaattaanatttttccgataaggaaacggaggcccgggaantgatccntttggagttaccaggtcagtttagcattaggntgacagttgngaccaattnatccttgcccgttggttggaaggagaggggantaagggttaagctcntgagtcccttgaaggccttggaatcgggaattcccttaaagccaacccctttgccgttgaactgcaccaaccagatgtctnccagtttgcttgaagagacgggattcantgntgtggagaggggcaggagggntgggaggtgacntnacagggttcagggattcttttagaagggtccaggctcatggcttcccccccccccagccaggtcagacactaaagtgtcttaagcccctccatacctgccgctcccccaccttggatgaagccggccattaggcagggaccgtctctgggagaggccaagccctctggctcacttgtggatttcctttaagcaagacttcctctctgcttccaggactcctgtcaaacaagagggtccctggcttagagtttgggagctgcaggcagaacagacattccccgatgactcacaagcctggaactctgtgggccagcaggaatggggatggctttctggtcagtcagggtcaactgggacactcactctgagacagggaggcaagggagaaacaggtcagaggtagagagagctcagtccagggactcacggtgaggtccctaaggtgcgtagggagaggatntaacattcggtttggnnagctagaaaagatctntaaaa

SEQ ID NO: 211 - DNA, 565 bp, Artificial Sequence
  Description of Artificial Sequence: Note = Synthetic Construct
  misc_feature (2)..(2): n is a, c, g, or t
  misc_feature (6)..(7): n is a, c, g, or t
  misc_feature (11)..(11): n is a, c, g, or t
  misc_feature (431)..(431): n is a, c, g, or t
  misc_feature (438)..(438): n is a, c, g, or t
  misc_feature (513)..(513): n is a, c, g, or t
tncatnncacncagaattcacaaagatacagtgtttcagttcgttaaaacgttgctctatcttgaataacaagcttattacatgcgaatcctgtttggaacctactgaattcctgatccactgagactgagataaaaagtgcttgttgttttagggggtgggggggcatttgttatgcaatggtcggtgactaacacagaaacagagagaagggtcatccacaggcttcccaaaattcattcccaggcacactgaccccagggctatgctttggaagcactctcagagaatgcaggcacaccatggcctgattcctggtgaagattcccagactccttgcgtgagcagcacccttctgggccggggagctgtcctcccagccctgtatttctcagaagctctgggtttctgccatcagaatcctttggganacacagncaaactgccatgtgacctcctgaggtcttggtcttggatttggcccccttggggtgtttcttgtgtccaccatgnaccttgggtggagtccccatccctgtgaacgctagttgctccgaacaatcgg

SEQ ID NO: 212 - DNA, 944 bp, Artificial Sequence
  Description of Artificial Sequence: Note = Synthetic Construct
  misc_feature (9)..(9): n is a, c, g, or t
  misc_feature (14)..(14): n is a, c, g, or t
  misc_feature (24)..(24): n is a, c, g, or t
  misc_feature (30)..(32): n is a, c, g, or t
  misc_feature (34)..(35): n is a, c, g, or t
  misc_feature (622)..(622): n is a, c, g, or t
  misc_feature (664)..(664): n is a, c, g, or t
  misc_feature (730)..(730): n is a, c, g, or t
  misc_feature (754)..(754): n is a, c, g, or t
  misc_feature (765)..(765): n is a, c, g, or t
  misc_feature (769)..(769): n is a, c, g, or t
  misc_feature (793)..(793): n is a, c, g, or t
  misc_feature (851)..(851): n is a, c, g, or t
  misc_feature (876)..(876): n is a, c, g, or t
  misc_feature (896)..(896): n is a, c, g, or t
  misc_feature (899)..(899): n is a, c, g, or t
  misc_feature (919)..(919): n is a, c, g, or t
  misc_feature (923)..(923): n is a, c, g, or t
  misc_feature (925)..(925): n is a, c, g, or t
  misc_feature (936)..(936): n is a, c, g, or t
gggcaactnatccnctaagtgaancccttnnncnntctcattcaggagggctggtattcctttaattgtgatgtaaattaagtccattgttttaattttagggatgatttcagagagctaagtctctgtacagggtctttgttgttgaattcagggtactggtgcaggcttctgttctaactgtgatgagtttaagatggaatgggaggagaggaattggaaagaccaagtataaacaattcctcagaagttttactgccaaaatgaacaaagaaatggaacaaaagctgggagggcaagtgacatttttaaaagaatgttttggccggacacggtgactcatgcctgtaatctcagcactttgggaggccaagacaggcagatcacttgaggtcaggagttcaagatcagcctggccaacatggtaaaaccccacctctactaaaaatacaaaaattagctgggtgtggtggtgggcacctgtaatcccagctacttgagaggctgaggcaggagaatcgctgggacccgggaggcagagattgcagtgaatttcgctgctgtctctagcctgggtgatagagcgaaactccatatcaagaaaaaaaagaatgtttttcanatgggaaaaaaaacagcatataagcatattgatgggaaaganccagtaatgagagaaaagttaataaagccagaagataatatttcttgatcctgtgacttccctatncctatgaagatacttttattattnctgttactatngganggaccaaaagggtaaataacttgnccatggtcatgcaatgaactaagtaagttgtaaaactctttatttatgcctgcctttntgagtaataagagaaattagtccancccgtttttaaaatttgttnttnaagcttttattaattaaaanaatntngctgggcacanaggggtac

SEQ ID NO: 213 - DNA, 911 bp, Artificial Sequence
  Description of Artificial Sequence: Note = Synthetic Construct
  misc_feature (22)..(22): n is a, c, g, or t
  misc_feature (27)..(27): n is a, c, g, or t
  misc_feature (40)..(40): n is a, c, g, or t
  misc_feature (43)..(43): n is a, c, g, or t
  misc_feature (53)..(53): n is a, c, g, or t
  misc_feature (60)..(60): n is a, c, g, or t
  misc_feature (64)..(65): n is a, c, g, or t
  misc_feature (78)..(78): n is a, c, g, or t
  misc_feature (108)..(108): n is a, c, g, or t
  misc_feature (117)..(117): n is a, c, g, or t
  misc_feature (129)..(129): n is a, c, g, or t
  misc_feature (150)..(150): n is a, c, g, or t
  misc_feature (156)..(156): n is a, c, g, or t
  misc_feature (177)..(177): n is a, c, g, or t
  misc_feature (182)..(182): n is a, c, g, or t
  misc_feature (186)..(186): n is a, c, g, or t
  misc_feature (190)..(190): n is a, c, g, or t
  misc_feature (203)..(203): n is a, c, g, or t
  misc_feature (209)..(209): n is a, c, g, or t
  misc_feature (234)..(235): n is a, c, g, or t
  misc_feature (241)..(241): n is a, c, g, or t
  misc_feature (253)..(253): n is a, c, g, or t
  misc_feature (269)..(269): n is a, c, g, or t
  misc_feature (276)..(277): n is a, c, g, or t
  misc_feature (283)..(283): n is a, c, g, or t
  misc_feature (312)..(312): n is a, c, g, or t
  misc_feature (317)..(317): n is a, c, g, or t
  misc_feature (335)..(335): n is a, c, g, or t
  misc_feature (338)..(338): n is a, c, g, or t
  misc_feature (345)..(345): n is a, c, g, or t
  misc_feature (347)..(347): n is a, c, g, or t
  misc_feature (354)..(354): n is a, c, g, or t
  misc_feature (356)..(356): n is a, c, g, or t
  misc_feature (368)..(369): n is a, c, g, or t
  misc_feature (372)..(372): n is a, c, g, or t
  misc_feature (378)..(378): n is a, c, g, or t
  misc_feature (393)..(394): n is a, c, g, or t
  misc_feature (399)..(399): n is a, c, g, or t
  misc_feature (426)..(426): n is a, c, g, or t
  misc_feature (431)..(431): n is a, c, g, or t
  misc_feature (466)..(468): n is a, c, g, or t
  misc_feature (477)..(477): n is a, c, g, or t
  misc_feature (503)..(503): n is a, c, g, or t
  misc_feature (512)..(512): n is a, c, g, or t
  misc_feature (519)..(519): n is a, c, g, or t
  misc_feature (524)..(524): n is a, c, g, or t
  misc_feature (528)..(528): n is a, c, g, or t
  misc_feature (535)..(535): n is a, c, g, or t
  misc_feature (539)..(539): n is a, c, g, or t
  misc_feature (541)..(543): n is a, c, g, or t
  misc_feature (568)..(569): n is a, c, g, or t
  misc_feature (573)..(573): n is a, c, g, or t
  misc_feature (577)..(577): n is a, c, g, or t
  misc_feature (589)..(589): n is a, c, g, or t
  misc_feature (613)..(613): n is a, c, g, or t
  misc_feature (617)..(617): n is a, c, g, or t
  misc_feature (625)..(625): n is a, c, g, or t
  misc_feature (628)..(628): n is a, c, g, or t
  misc_feature (632)..(632): n is a, c, g, or t
  misc_feature (648)..(648): n is a, c, g, or t
  misc_feature (656)..(656): n is a, c, g, or t
  misc_feature (662)..(662): n is a, c, g, or t
  misc_feature (666)..(666): n is a, c, g, or t
  misc_feature (677)..(677): n is a, c, g, or t
  misc_feature (690)..(690): n is a, c, g, or t
  misc_feature (693)..(693): n is a, c, g, or t
  misc_feature (700)..(700): n is a, c, g, or t
  misc_feature (704)..(704): n is a, c, g, or t
  misc_feature (722)..(722): n is a, c, g, or t
  misc_feature (733)..(734): n is a, c, g, or t
  misc_feature (753)..(753): n is a, c, g, or t
  misc_feature (763)..(763): n is a, c, g, or t
  misc_feature (787)..(787): n is a, c, g, or t
  misc_feature (790)..(790): n is a, c, g, or t
  misc_feature (801)..(801): n is a, c, g, or t
  misc_feature (803)..(803): n is a, c, g, or t
  misc_feature (814)..(814): n is a, c, g, or t
  misc_feature (822)..(822): n is a, c, g, or t
  misc_feature (824)..(824): n is a, c, g, or t
  misc_feature (833)..(834): n is a, c, g, or t
  misc_feature (845)..(846): n is a, c, g, or t
  misc_feature (848)..(848): n is a, c, g, or t
  misc_feature (850)..(850): n is a, c, g, or t
  misc_feature (868)..(868): n is a, c, g, or t
  misc_feature (870)..(870): n is a, c, g, or t
  misc_feature (886)..(886): n is a, c, g, or t
  misc_feature (894)..(894): n is a, c, g, or t
  misc_feature (900)..(900): n is a, c, g, or t
tcctatatctgggagctccttnagaangaacgcatggtcngcncccaggtaanaaaccanattnnagaatgtacggtnaaataagtggatattttagttatcatttantctgagtanaacctagctatntggccaagatatctgtaaatntatttngagttcgagttttatttctangatcntggnttanaagcaaaccttcnccagantcttcagatgaagacaactatgttnncttacnggcactatctcnactcccgaaagccacntttcatnnatgctnacattgaagctttaaaattctggttcctnaacantgcccttttagttggaanaancacccangntcttttnanactttgttcaannccnctgacntgattctgccatgtnncttangccactaagcctctcccttggcccctnactanggaatggatgctggatcccgtctctcattaatacnnngttgttacngtgttgggaactattacccccccacngttcatgtnaatcccnttaantttnttttatncctncnnncctttaaaaatcccttgttatattnnaccntatnggttttgaaaantatttaaatttgttttttttctgnaacnttttcctnttnaaantattactcccggttgntttaaccntgaagngaanaccttttttcnaagaaaaatcttnttnttttttnaaantttgttaaaaatataagntttcttatttnnccctagggggtttgttccnaaagtttttnttcctttttttcgaactctaaaanagnggccaaaatananttttttttatntccccgcncnctctttttnnttttttttccnnantntttttttctttcttcccntntatttccctttcatcntctccccntttggngtaatacaaaa

SEQ ID NO: 214 - DNA, 925 bp, Artificial Sequence
  Description of Artificial Sequence: Note = Synthetic Construct
  misc_feature (12)..(12): n is a, c, g, or t
  misc_feature (32)..(32): n is a, c, g, or t
  misc_feature (48)..(48): n is a, c, g, or t
  misc_feature (63)..(63): n is a, c, g, or t
  misc_feature (209)..(209): n is a, c, g, or t
  misc_feature (601)..(601): n is a, c, g, or t
  misc_feature (603)..(603): n is a, c, g, or t
  misc_feature (644)..(644): n is a, c, g, or t
  misc_feature (647)..(647): n is a, c, g, or t
  misc_feature (652)..(653): n is a, c, g, or t
  misc_feature (675)..(675): n is a, c, g, or t
  misc_feature (729)..(729): n is a, c, g, or t
  misc_feature (750)..(750): n is a, c, g, or t
  misc_feature (770)..(770): n is a, c, g, or t
  misc_feature (774)..(775): n is a, c, g, or t
  misc_feature (793)..(793): n is a, c, g, or t
  misc_feature (818)..(818): n is a, c, g, or t
  misc_feature (839)..(839): n is a, c, g, or t
  misc_feature (846)..(846): n is a, c, g, or t
  misc_feature (856)..(856): n is a, c, g, or t
  misc_feature (862)..(863): n is a, c, g, or t
  misc_feature (869)..(869): n is a, c, g, or t
  misc_feature (900)..(900): n is a, c, g, or t
  misc_feature (904)..(904): n is a, c, g, or t
  misc_feature (911)..(911): n is a, c, g, or t
  misc_feature (922)..(922): n is a, c, g, or t
ccattccatctnattcagcagtcagtctaatncttgcaaaaagaatangaggtctggggacgncatatcagcaaacaagtcactaacaaccaagcaggaaattgacaaagatttccttacaaagatcatcttggaaaaaaaaagtataaaaaccaaatatgcatttctttcccacataaacaattctgtaaaaagattctatgacagangtctgcagtctcagtattaaggaggcacagcaggatatccagaagtttgaggtcatactactctacatactgtaaaccatcttgaaaaaaaaaaaaatgtacaaggcctgtatcccatcactgggaggtagggacaaggggatcaggaatttgaggccagctgggctagtggggatgctgggactcttacgaaatccccaatacatatcgaccctccaaagtatctccatcaattcccaaatagatgttaatttcaaaacccccagctttgttgaatcatctctgcactatatgaaaaagccttactgctcccgcattattaagcccgctgaagacactgctagggccctcaatttactcttggaagcttcctggcaaaaacaaacaccccntngcacgacagtgtccactgtttatctataatctttccaacanatnttgcnncccactagttcaaaatccgatngggatgggggcgggaatccaaaagtcggaacataagcgaaaccaaatctgaacncccccctgacagacaaaggtnggctggtcccccaaggaacncaannccctccaggttcccccgnttcaccccggcaaaccccttggttntaccacccttaaacggcaacnttcttcncaattaaaancccttnntggccncccagttttcctataaaaaaatcccgttccncccngttaaantcttatggccnaaa

SEQ ID NO: 215 - DNA, 329 bp, Artificial Sequence
  Description of Artificial Sequence: Note = Synthetic Construct
  misc_feature (1)..(1): n is a, c, g, or t
  misc_feature (3)..(3): n is a, c, g, or t
  misc_feature (10)..(10): n is a, c, g, or t
  misc_feature (16)..(16): n is a, c, g, or t
  misc_feature (20)..(20): n is a, c, g, or t
  misc_feature (23)..(23): n is a, c, g, or t
  misc_feature (27)..(27): n is a, c, g, or t
  misc_feature (35)..(35): n is a, c, g, or t
  misc_feature (40)..(40): n is a, c, g, or t
  misc_feature (47)..(47): n is a, c, g, or t
  misc_feature (57)..(57): n is a, c, g, or t
  misc_feature (61)..(61): n is a, c, g, or t
  misc_feature (75)..(75): n is a, c, g, or t
  misc_feature (80)..(80): n is a, c, g, or t
  misc_feature (90)..(90): n is a, c, g, or t
  misc_feature (102)..(102): n is a, c, g, or t
  misc_feature (104)..(104): n is a, c, g, or t
  misc_feature (117)..(117): n is a, c, g, or t
  misc_feature (121)..(121): n is a, c, g, or t
  misc_feature (125)..(125): n is a, c, g, or t
  misc_feature (127)..(127): n is a, c, g, or t
  misc_feature (131)..(131): n is a, c, g, or t
  misc_feature (145)..(145): n is a, c, g, or t
  misc_feature (149)..(149): n is a, c, g, or t
  misc_feature (159)..(159): n is a, c, g, or t
  misc_feature (167)..(168): n is a, c, g, or t
  misc_feature (174)..(175): n is a, c, g, or t
  misc_feature (181)..(181): n is a, c, g, or t
  misc_feature (184)..(186): n is a, c, g, or t
  misc_feature (190)..(190): n is a, c, g, or t
  misc_feature (192)..(192): n is a, c, g, or t
  misc_feature (194)..(194): n is a, c, g, or t
  misc_feature (200)..(200): n is a, c, g, or t
  misc_feature (203)..(203): n is a, c, g, or t
  misc_feature (221)..(221): n is a, c, g, or t
  misc_feature (225)..(225): n is a, c, g, or t
  misc_feature (228)..(228): n is a, c, g, or t
  misc_feature (230)..(234): n is a, c, g, or t
  misc_feature (238)..(240): n is a, c, g, or t
  misc_feature (242)..(242): n is a, c, g, or t
  misc_feature (249)..(249): n is a, c, g, or t
  misc_feature (259)..(259): n is a, c, g, or t
  misc_feature (267)..(267): n is a, c, g, or t
  misc_feature (269)..(269): n is a, c, g, or t
  misc_feature (272)..(273): n is a, c, g, or t
  misc_feature (275)..(279): n is a, c, g, or t
  misc_feature (281)..(282): n is a, c, g, or t
  misc_feature (284)..(284): n is a, c, g, or t
  misc_feature (286)..(286): n is a, c, g, or t
  misc_feature (292)..(292): n is a, c, g, or t
  misc_feature (311)..(312): n is a, c, g, or t
  misc_feature (314)..(314): n is a, c, g, or t
  misc_feature (319)..(319): n is a, c, g, or t
  misc_feature (321)..(321): n is a, c, g, or t
  misc_feature (323)..(325): n is a, c, g, or t
ncnacgagangtcaangtgnaanctgncgatgatnaaaanaaccgancttagggtgncaangggttacccagganggggncaaagcaagntccaggcccatnanggacctgctggtncatngccngnaaanacctacttatcctngaanagcccgaaangtccgctnngaccanntaagtncannncaanangnaccacnccnttaacaccaccgtatgancccnaantnnnnnccannnancttgggngaacttcccngacaactnantanntnnnnnanncncncttaanattccggttccaacaaaanntntggcntncnnncccc

SEQ ID NO: 216 - DNA, 539 bp, Artificial Sequence
  Description of Artificial Sequence: Note = Synthetic Construct
  misc_feature (108)..(108): n is a, c, g, or t
  misc_feature (435)..(435): n is a, c, g, or t
  misc_feature (452)..(452): n is a, c, g, or t
  misc_feature (481)..(481): n is a, c, g, or t
  misc_feature (487)..(487): n is a, c, g, or t
  misc_feature (498)..(498): n is a, c, g, or t
  misc_feature (502)..(502): n is a, c, g, or t
  misc_feature (509)..(509): n is a, c, g, or t
  misc_feature (526)..(526): n is a, c, g, or t
  misc_feature (536)..(536): n is a, c, g, or t
catttcacacagaattcttttgattgttagcaagaaacttatctttatctaagcagtttagggaggaacctcaagggcatccatagtgaatgcagcctacagctgtgnaacacaggtttcttttggagagcaggcctgtgcaagcccagaaccgaggtgggacagttcaagctaccctttttccatgaccaatttggatcacattaagacagtatttcttccaggtgatggatttccaatttatggaattgaactaacttactgagagtggaggtgacttagagagttaatgtacagaaggaataatccagaatgtcctcaaaagcttgctggtcaccccagggctttttaaaagctcagcacctagagaactaatgtagtctttgggttattctcaagcttaggtctttcttctcattattagctgaccatganacaaaagagtcatcggngtcacaatagaacttggtgggcacttggnttacancacactttcanatcnctcccgnttgggggtctcaagttnttttttaganccc

SEQ ID NO: 217 - DNA, 1076 bp, Artificial Sequence
  Description of Artificial Sequence: Note = Synthetic Construct
  misc_feature (2)..(6): n is a, c, g, or t
  misc_feature (9)..(12): n is a, c, g, or t
  misc_feature (19)..(20): n is a, c, g, or t
  misc_feature (25)..(26): n is a, c, g, or t
  misc_feature (28)..(28): n is a, c, g, or t
  misc_feature (33)..(33): n is a, c, g, or t
  misc_feature (39)..(39): n is a, c, g, or t
  misc_feature (45)..(45): n is a, c, g, or t
  misc_feature (756)..(756): n is a, c, g, or t
  misc_feature (784)..(784): n is a, c, g, or t
  misc_feature (800)..(800): n is a, c, g, or t
  misc_feature (809)..(809): n is a, c, g, or t
  misc_feature (817)..(817): n is a, c, g, or t
  misc_feature (826)..(826): n is a, c, g, or t
  misc_feature (879)..(879): n is a, c, g, or t
  misc_feature (884)..(884): n is a, c, g, or t
  misc_feature (886)..(886): n is a, c, g, or t
  misc_feature (908)..(908): n is a, c, g, or t
  misc_feature (924)..(924): n is a, c, g, or t
  misc_feature (945)..(945): n is a, c, g, or t
  misc_feature (947)..(948): n is a, c, g, or t
  misc_feature (952)..(952): n is a, c, g, or t
  misc_feature (956)..(956): n is a, c, g, or t
  misc_feature (964)..(964): n is a, c, g, or t
  misc_feature (975)..(975): n is a, c, g, or t
  misc_feature (1003)..(1003): n is a, c, g, or t
  misc_feature (1005)..(1005): n is a, c, g, or t
  misc_feature (1040)..(1040): n is a, c, g, or t
  misc_feature (1075)..(1075): n is a, c, g, or t
gnnnnntgnnnnatttgannccctnntnatccnctttgnactaancccatatttcaatattaattttatttgtaaaagttacacttctcaaaggcaaccactactaccagtttcttctgtatttttctaaagatagtctatgcaaagaactccatataaatccttttaaaaaaaaaaaccaaatggtgttattctatacatgctcattctactttttcatacttaacgtatgttggagatccttccacatctatacatgaaaagctgcctctttcttttctagaggtgcatggtatcttgcaggctgcacgttaatttatttcacctattgatggacatttaaattattttccatattttgggattgtaagcaatgtctcaataaataaccatgcaattgtgtcatttcgaacgtgaatatttctataggataactttctgaaattagaatcattagatcaaagggtatatgcactttaaattgtggttacatattgtcaaactgtactccctacaaagttctgctaatttacaattccactagtacaatgtgttcttgttagctgagaggtggaaaaacaataactcatttaagtttaatttgcttttctcttatgagtgaacttggtcatgtttaaataggcttaaggagccatttgcagttactttctataaattgcctgttattatttgctgactttttttttttttagacgggggtcactctgtccctaggttggagtgcagtggcacggncttggctcacctgtaacctcccctccangctcaagtggatcctntcacctcancctcaaanaaacctganaaccccaggcccccccccaatatgcccccgttaattttttttttttttttttngggananaacaggggttcaccctggttanccaaggcttggtcttngagccttttggagcccccccnannttancccnccttaagngtttccaaaantgcttggggattaccaggctgaagggancnttgccccacccctattttggcaacctttcctattngggggggggggactttattggatttggggggagtnt

SEQ ID NO: 218 - DNA, 927 bp, Artificial Sequence
  Description of Artificial Sequence: Note = Synthetic Construct
  misc_feature (8)..(8): n is a, c, g, or t
  misc_feature (14)..(14): n is a, c, g, or t
  misc_feature (26)..(26): n is a, c, g, or t
  misc_feature (45)..(45): n is a, c, g, or t
  misc_feature (54)..(54): n is a, c, g, or t
  misc_feature (56)..(57): n is a, c, g, or t
  misc_feature (486)..(486): n is a, c, g, or t
  misc_feature (502)..(502): n is a, c, g, or t
  misc_feature (546)..(546): n is a, c, g, or t
  misc_feature (603)..(603): n is a, c, g, or t
  misc_feature (623)..(623): n is a, c, g, or t
  misc_feature (638)..(638): n is a, c, g, or t
  misc_feature (651)..(651): n is a, c, g, or t
  misc_feature (656)..(656): n is a, c, g, or t
  misc_feature (667)..(667): n is a, c, g, or t
  misc_feature (681)..(681): n is a, c, g, or t
  misc_feature (696)..(696): n is a, c, g, or t
  misc_feature (702)..(703): n is a, c, g, or t
  misc_feature (718)..(719): n is a, c, g, or t
  misc_feature (723)..(723): n is a, c, g, or t
  misc_feature (730)..(730): n is a, c, g, or t
  misc_feature (737)..(737): n is a, c, g, or t
  misc_feature (744)..(744): n is a, c, g, or t
  misc_feature (752)..(753): n is a, c, g, or t
  misc_feature (769)..(769): n is a, c, g, or t
  misc_feature (777)..(777): n is a, c, g, or t
  misc_feature (784)..(784): n is a, c, g, or t
  misc_feature (797)..(797): n is a, c, g, or t
  misc_feature (802)..(802): n is a, c, g, or t
  misc_feature (816)..(816): n is a, c, g, or t
  misc_feature (819)..(819): n is a, c, g, or t
  misc_feature (829)..(829): n is a, c, g, or t
  misc_feature (846)..(846): n is a, c, g, or t
  misc_feature (848)..(848): n is a, c, g, or t
  misc_feature (856)..(856): n is a, c, g, or t
  misc_feature (859)..(859): n is a, c, g, or t
  misc_feature (863)..(863): n is a, c, g, or t
  misc_feature (866)..(866): n is a, c, g, or t
  misc_feature (882)..(882): n is a, c, g, or t
  misc_feature (895)..(895): n is a, c, g, or t
  misc_feature (908)..(908): n is a, c, g, or t
  misc_feature (917)..(917): n is a, c, g, or t
  misc_feature (926)..(926): n is a, c, g, or t
caattcantcttantcaagtctgagntcacttgggtgaactcagnagcttgggnanngggtctggtgctcagaggtagctaagtaaataagccagctaacctcagccaacttatgacagcatcttatcacttgccccttcctaagcactctgagtatgaatccctcctctctccttttggtttttgtcccccccacccccacccccagccactttctctttgtgtttgttctaaaagagaaagcttagaaacggactttttttttttttttttttttttagagcaagagggtcctttgtaaagccttctatttaaattcgtataagagataataaaatggcgaatataatcacttattttgttaaaaggtgggagaagcatttttaaagggtaaacttcaaggaaatgcagcttctggggaaacaggtgcggaaatgtgtacgtgtaagtgcaccagaatttcatggatgaacttacttatcacanggaactttttaactancattgaaaaggcctcagatatgtttaaaacccaagctaaggacntatttaatcgaccatttctggcactcctgggggggggaaggaaaaacccaaatttcnggggcccctttcccaaaccnctcccaaaagaaaanaccccccagaaanttgcncctcctgaacngaaacccattcctnttttatttgaccaantttaannaaaagcccttaaacnncccnggtccanccgttcncccagcnttccaggnncccagaaaggttcaancccttttnctttttnaaaaattgttctnaaatntaaaaaaggtaacnccngggaatggangggttcctttccattcncnttcccccnttncccnaanttttttcccctaaaangaaaaagggaatntaaattggccccnaaaatttcnggtggcccna

SEQ ID NO: 219 - DNA, 905 bp, Artificial Sequence
  Description of Artificial Sequence: Note = Synthetic Construct
  misc_feature (11)..(11): n is a, c, g, or t
  misc_feature (192)..(192): n is a, c, g, or t
  misc_feature (196)..(196): n is a, c, g, or t
  misc_feature (199)..(199): n is a, c, g, or t
  misc_feature (366)..(366): n is a, c, g, or t
  misc_feature (445)..(445): n is a, c, g, or t
  misc_feature (469)..(469): n is a, c, g, or t
  misc_feature (475)..(475): n is a, c, g, or t
  misc_feature (552)..(552): n is a, c, g, or t
  misc_feature (570)..(570): n is a, c, g, or t
  misc_feature (604)..(604): n is a, c, g, or t
  misc_feature (637)..(637): n is a, c, g, or t
  misc_feature (704)..(704): n is a, c, g, or t
  misc_feature (717)..(717): n is a, c, g, or t
  misc_feature (747)..(747): n is a, c, g, or t
  misc_feature (758)..(758): n is a, c, g, or t
  misc_feature (767)..(767): n is a, c, g, or t
  misc_feature (779)..(779): n is a, c, g, or t
  misc_feature (814)..(814): n is a, c, g, or t
  misc_feature (831)..(831): n is a, c, g, or t
  misc_feature (849)..(849): n is a, c, g, or t
  misc_feature (855)..(855): n is a, c, g, or t
  misc_feature (871)..(871): n is a, c, g, or t
  misc_feature (873)..(873): n is a, c, g, or t
  misc_feature (881)..(881): n is a, c, g, or t
  misc_feature (893)..(893): n is a, c, g, or t
  misc_feature (901)..(901): n is a, c, g, or t
caattcacatngaatcctaatagccattgcagaaggagaaaatgatttcctcaaatcaacctctgatatccaccccaacccaactaacacccgcgtgtgtgtgtgtgtgtgtgtgtgtgtgtgtgtgtgtgcatgtatatacataaatgaaaaacatatttaaaccactgtggtctttaattgcactggganaaanttngtaataatggcagtcacactggaaaattacatcgttcttgtttaaaataatgatcaagaactttggcttgcagtttacgatccattagctaaaagcatcctgtagtttactggaaagtggggaaaagtgcattaacacttactgatcttttccaatctctctccgantttatttcatgtgtctctaaagctttttttttttttttgcaaacgttattaaattcttgaagactatcttaatatctanaaattttaatggcaaaaactccanacaatngactatgatgtgtcatgtctctaaatcctcaccttaagaaactgaagcaaaaaggtcattgactccctaaatccaanctgttaaacaaaatatantttaacaaaaccccttccaacaacttatattgantaaacaaccttgttgtttacactgataaatgangccttaaaatatttgttttaaagcgaagcccacatgtctaacataaaacaactctgaaggagtaaanaggtgttgaaaanacaccaggtaataatatccctaattacacncgcacacacanaataacaanacccttccttcncaaactcaaataatcttgacctgctacgaactatntggatggggattgaggnattaacacccgcaggaanaaaacncgttgccatccccctntnctgaacancaaatttcgttnttaaaccnaaaa

SEQ ID NO: 220 - DNA, 554 bp, Artificial Sequence
  Description of Artificial Sequence: Note = Synthetic Construct
  misc_feature (25)..(26): n is a, c, g, or t
  misc_feature (37)..(37): n is a, c, g, or t
  misc_feature (50)..(50): n is a, c, g, or t
  misc_feature (52)..(52): n is a, c, g, or t
  misc_feature (269)..(269): n is a, c, g, or t
  misc_feature (328)..(328): n is a, c, g, or t
  misc_feature (398)..(398): n is a, c, g, or t
  misc_feature (419)..(419): n is a, c, g, or t
  misc_feature (448)..(448): n is a, c, g, or t
  misc_feature (466)..(466): n is a, c, g, or t
  misc_feature (469)..(469): n is a, c, g, or t
  misc_feature (473)..(473): n is a, c, g, or t
  misc_feature (480)..(480): n is a, c, g, or t
  misc_feature (502)..(502): n is a, c, g, or t
  misc_feature (511)..(511): n is a, c, g, or t
caattccattttaatcgcctagagnntttattccaancgtgaaaattttncnataccccgaacagtccacttattactactgccgcctattgggaactaaccgagttcaccatgttactcagattcggctaaccaaatttttataaatctttaaaagtacacatattacaagagcaggctactaggaactaactgaattcggtagtgctccttttgtttctattttgtggaataatttggacagtattggtatgagatcttctatgaangtctgatagaattctcagtctggctgctgtgtgaggcagtgtctggagaatggggcttnggcaatagcaggtgtatgatgagctaggacatctctcttcattctcctggcgaccattgcaaacttacanctgctgggctactgaaggganggttgctcttaccttacgcaatcctacanaaacagtcacatctccantcnatanatgcccngggctaacctttactttaatanccactttcnatatggttttttttttttttgggtccttttttccgactgggtc

SEQ ID NO: 221 - DNA, 551 bp, Artificial Sequence
  Description of Artificial Sequence: Note = Synthetic Construct
aaaccactgtggtctttaattgcactggatacatttgtaataatggcagtcacactggaaattacatcgttcttgtttaaaataatgatcaagaactttggcttgcagtttacgatccattagctaaaagcatcctgtagtttactggaaagtggggaaaagtgcattaacacttactgatcttttccaatctctctccgagtttatttcatgtgtctctaaagctttttttttttttgcaaacgttattaaattcttgaagactatcttaatatctagaaattttaatggcaaaaactccagacaattgactatgatgtgtcatgtctctaaattctcactcttaggagactgatgcataaaggtcattgactccctaaattcagagctgttaaacaaaatatagttttaagcaaagactcccttcaaacaacttatattgagtaaaacaaccttgtttgtttacactgattaaatgatgccattagaatattttggttttaaagcgatgccacacattgtctagcattaaagcaatctctgaaggatgt

SEQ ID NO: 222 - DNA, 554 bp, Artificial Sequence; identical to SEQ ID NO: 220
  Description of Artificial Sequence: Note = Synthetic Construct
  misc_feature (25)..(26): n is a, c, g, or t
  misc_feature (37)..(37): n is a, c, g, or t
  misc_feature (50)..(50): n is a, c, g, or t
  misc_feature (52)..(52): n is a, c, g, or t
  misc_feature (269)..(269): n is a, c, g, or t
  misc_feature (328)..(328): n is a, c, g, or t
  misc_feature (398)..(398): n is a, c, g, or t
  misc_feature (419)..(419): n is a, c, g, or t
  misc_feature (448)..(448): n is a, c, g, or t
  misc_feature (466)..(466): n is a, c, g, or t
  misc_feature (469)..(469): n is a, c, g, or t
  misc_feature (473)..(473): n is a, c, g, or t
  misc_feature (480)..(480): n is a, c, g, or t
  misc_feature (502)..(502): n is a, c, g, or t
  misc_feature (511)..(511): n is a, c, g, or t

SEQ ID NO: 223 - DNA, 469 bp, Artificial Sequence
  Description of Artificial Sequence: Note = Synthetic Construct
  misc_feature (13)..(13): n is a, c, g, or t
  misc_feature (19)..(19): n is a, c, g, or t
  misc_feature (74)..(74): n is a, c, g, or t
  misc_feature (239)..(239): n is a, c, g, or t
  misc_feature (314)..(314): n is a, c, g, or t
  misc_feature (452)..(452): n is a, c, g, or t
cattcacactttnattccngcccgcctacctgtgcaaaaatctgcatagtatttagctatcgtacatttctgcnagcatatttatcgaagtatgaaccattaaacaaataaagtacctggcttcagtgggagagaaagtgcctagcctcaaaaagacttgaagtgccagggtgtgtgtgtgtgtgtgtgtgtgtgtgtgtgtatgtgtgtgtgtgtgtgtttgtgtgtgtgtaacccanaggggtgcccacttgctcaaaagagaaggggcagaggaatatgagggaaggattgtgggagggagtgaccagtanggaaacagtgagtgtgatgtaaagtgaataagtaaaaaaattaaattaaattaaaagtaaataaagtgtctacaaagtcaattactcctttcccttcctccaccctttcttctaatattaggcaaaaacaaacacaanaacaaaaacaaacaaac

SEQ ID NO: 224 - DNA, 279 bp, Artificial Sequence
  Description of Artificial Sequence: Note = Synthetic Construct
  misc_feature (8)..(8): n is a, c, g, or t
  misc_feature (14)..(14): n is a, c, g, or t
  misc_feature (20)..(20): n is a, c, g, or t
  misc_feature (25)..(25): n is a, c, g, or t
  misc_feature (38)..(38): n is a, c, g, or t
  misc_feature (53)..(53): n is a, c, g, or t
  misc_feature (199)..(199): n is a, c, g, or t
caattcanttttantcaganaggcntattacaggcaancctattcccagtttntgctgtagaactggaacctcaggcctcattctgaatctgcagccctccccagcatccctcctggcacagcctggcacagacctgctaagtgtctattagtgactaatacaaaggagtatttcagaacgttggcacatctcagcacnttgcaactggctggagctggttgagctcttgctgctccatatcctttgtagctgctctccacttttctgaaccccggggt

SEQ ID NO: 225 - DNA, 786 bp, Artificial Sequence
  Description of Artificial Sequence: Note = Synthetic Construct
  misc_feature (436)..(436): n is a, c, g, or t
  misc_feature (496)..(496): n is a, c, g, or t
ctcgtgccgaaaaggtctcttattgataagcaagttggacactgatttaaatagttgtaaactcttcttatacattatccttcatcctaaacctaagtcagttttttaaatttaaatttattattattatttttttacttattcactttacatcccgctcactgtttcccccgcccagtcaccacctctgacaatccttcctccttccctctccccttctccactgtggggatggggcccccttgggtatttcccctcaccctggcacttcaagtctctgccaggctaggcactttctcttccactgaagccagacaaggcagcccagctagtagaacatatccctcatccaggcaacagcttttgggatagccccagctccagttgttcaggacccacatgaaagtcaagctgcacatctgtacatatgaccagngagacttagatccagcctgtgtatgttctatggttggtggttcagactctcagagcccanagtgagcccagggtccaggttagttgactctgttggtctttctgtggagtttctatctccctctggacccacaatccttcctcctattcttctgtaagaatttccaagctccttggaaatccttgggaccgagggtgttgatgccccagtgtacaggaatgccggggtgggtgggtaggggagcaccttcatagaggcaggaggaggggggatgggatagggggtttcctcaggggagacctggaaaggggaaaacatttgaaatgtaaataaaagatctaataaaaaaa

SEQ ID NO: 226 - DNA, 889 bp, Artificial Sequence
  Description of Artificial Sequence: Note = Synthetic Construct
  misc_feature (15)..(15): n is a, c, g, or t
  misc_feature (25)..(25): n is a, c, g, or t
  misc_feature (38)..(38): n is a, c, g, or t
  misc_feature (341)..(341): n is a, c, g, or t
  misc_feature (477)..(477): n is a, c, g, or t
  misc_feature (482)..(482): n is a, c, g, or t
  misc_feature (510)..(510): n is a, c, g, or t
  misc_feature (557)..(557): n is a, c, g, or t
  misc_feature (562)..(562): n is a, c, g, or t
  misc_feature (564)..(564): n is a, c, g, or t
  misc_feature (591)..(591): n is a, c, g, or t
  misc_feature (595)..(595): n is a, c, g, or t
  misc_feature (601)..(602): n is a, c, g, or t
  misc_feature (611)..(611): n is a, c, g, or t
  misc_feature (615)..(616): n is a, c, g, or t
  misc_feature (645)..(645): n is a, c, g, or t
  misc_feature (650)..(650): n is a, c, g, or t
  misc_feature (658)..(658): n is a, c, g, or t
  misc_feature (665)..(665): n is a, c, g, or t
  misc_feature (669)..(669): n is a, c, g, or t
  misc_feature (695)..(695): n is a, c, g, or t
  misc_feature (703)..(703): n is a, c, g, or t
  misc_feature (727)..(727): n is a, c, g, or t
  misc_feature (731)..(731): n is a, c, g, or t
  misc_feature (735)..(735): n is a, c, g, or t
  misc_feature (742)..(742): n is a, c, g, or t
  misc_feature (748)..(748): n is a, c, g, or t
  misc_feature (750)..(750): n is a, c, g, or t
  misc_feature (752)..(753): n is a, c, g, or t
  misc_feature (755)..(755): n is a, c, g, or t
  misc_feature (767)..(767): n is a, c, g, or t
  misc_feature (773)..(773): n is a, c, g, or t
  misc_feature (791)..(791): n is a, c, g, or t
  misc_feature (798)..(799): n is a, c, g, or t
  misc_feature (807)..(807): n is a, c, g, or t
  misc_feature (814)..(814): n is a, c, g, or t
  misc_feature (838)..(839): n is a, c, g, or t
  misc_feature (841)..(841): n is a, c, g, or t
  misc_feature (847)..(847): n is a, c, g, or t
  misc_feature (850)..(850): n is a, c, g, or t
  misc_feature (862)..(862): n is a, c, g, or t
  misc_feature (865)..(865): n is a, c, g, or t
  misc_feature (867)..(867): n is a, c, g, or t
  misc_feature (869)..(870): n is a, c, g, or t
  misc_feature (873)..(873): n is a, c, g, or t
  misc_feature (877)..(877): n is a, c, g, or t
  misc_feature (880)..(880): n is a, c, g, or t
caattcaatttgaantcagttagtncccagtagcctanctcttgtacgatgtgtacttttaaagatttatcaaaatttggtgagccgaatctgagtaacatggtgaattcgacgcggttttaaatggctttcaagctctaagcatagtaattaatctatgaacactaaatttgttaggtagcaataaaagacatgggttggcaattaagccatttcctcaccaacacgcatttcttgtatttgtgacgtgagttgtatgtaaaaatcgatgacactcgcgtattttcaaacactatacaagacggttctatctgtgttcctgggtcttctactcaaaggangtggctctgcccctgctcgtcttctttcaggaatccttgagacgctaaccctacaaggataccaaataactctgtttattatttgcttgtccctccccttccttgtcagttaagcgactgggtgccctattcttancaacnaacaccactggacagcgataccgctcancactcccgttaattatttggaaccttcccaggcgattctccgcacancggtngnactttaaccggcaaatcctgccattcntttngggaannacggtggtnaacnngcctttttaacccaaattgaacgaaattnccttncccccctnttccgtngaanatggggcggaaaaatcctggggtccncccgaacnaaaaaaaagttccctgccggcccncccntttntcccccnaaacanancnngncaaaaagggaantgccanggcgccctaatcggggcnggggggnnccccaagnaacttgncccctcctcggcgggggcgggaanngnaagctnaanccttcccccccncgncncnnggnttcnacngttaatccc

SEQ ID NO: 227 - DNA, 643 bp, Artificial Sequence
  Description of Artificial Sequence: Note = Synthetic Construct
  misc_feature (38)..(38): n is a, c, g, or t
  misc_feature (60)..(60): n is a, c, g, or t
  misc_feature (187)..(187): n is a, c, g, or t
  misc_feature (531)..(531): n is a, c, g, or t
  misc_feature (554)..(554): n is a, c, g, or t
  misc_feature (583)..(583): n is a, c, g, or t
  misc_feature (637)..(637): n is a, c, g, or t
ccattttaatcggccccactggggcatgaaacacctcncccggctcatgagtcagcaggngagttatctaggtatgtgttttgtgttgcaaattcccatatatagaatatgggtcccgggaccatagaaagttgagcagctgggcaaaattcttccccaggaggtgtgttcaagagaagaggttcancccctgaaagagttccgtttctactcctcacaaacatcctgaaaaataggctaaatgttattctgtgaagagtcattactggttttactgatggtggaagttctcagactgtctagaaaggtaattttaaaacgtaagaaaattagacccctgtccccagatctgttggtgttgagaaatctgtagaaacttgagcaggaggaagtacaagaaagtatgtagctattgtaatccctttcaggaaggatgtgtttaaagctctattgttaaggcctttcgcttgcactgtgaagtaattttttactttttataagcttaaaggatggcttaataagacgtcttanaaatgtccacattatattggatnaacaaacgccaaagcacagtttgcgtcangggccacggggcatggggactaacggttcattcctttggaatctggatgcctangtgcag

SEQ ID NO: 228 - DNA, 880 bp, Artificial Sequence
  Description of Artificial Sequence: Note = Synthetic Construct
  misc_feature (13)..(13): n is a, c, g, or t
  misc_feature (26)..(26): n is a, c, g, or t
  misc_feature (30)..(30): n is a, c, g, or t
  misc_feature (195)..(195): n is a, c, g, or t
  misc_feature (553)..(553): n is a, c, g, or t
  misc_feature (635)..(635): n is a, c, g, or t
  misc_feature (657)..(657): n is a, c, g, or t
  misc_feature (663)..(663): n is a, c, g, or t
  misc_feature (694)..(694): n is a, c, g, or t
  misc_feature (706)..(706): n is a, c, g, or t
  misc_feature (715)..(715): n is a, c, g, or t
  misc_feature (724)..(724): n is a, c, g, or t
  misc_feature (735)..(735): n is a, c, g, or t
  misc_feature (742)..(743): n is a, c, g, or t
  misc_feature (748)..(748): n is a, c, g, or t
  misc_feature (756)..(756): n is a, c, g, or t
  misc_feature (758)..(758): n is a, c, g, or t
  misc_feature (760)..(760): n is a, c, g, or t
  misc_feature (786)..(787): n is a, c, g, or t
  misc_feature (790)..(790): n is a, c, g, or t
  misc_feature (799)..(799): n is a, c, g, or t
  misc_feature (812)..(813): n is a, c, g, or t
  misc_feature (821)..(822): n is a, c, g, or t
  misc_feature (829)..(829): n is a, c, g, or t
  misc_feature (832)..(832): n is a, c, g, or t
  misc_feature (842)..(842): n is a, c, g, or t
  misc_feature (844)..(844): n is a, c, g, or t
  misc_feature (847)..(847): n is a, c, g, or t
  misc_feature (856)..(856): n is a, c, g, or t
  misc_feature (858)..(858): n is a, c, g, or t
  misc_feature (863)..(863): n is a, c, g, or t
  misc_feature (874)..(874): n is a, c, g, or t
  misc_feature (876)..(876): n is a, c, g, or t
caattcacttgantcagttacttgcnggtnctcaaatatcaatgtaattggagatatgtcacacagagtttctgatgtccaagtggtgattttctcagagatcaacaagtttgaggtaaggatctgagaaatttatcttgtcaggtcttctagcacaagaggtaagtcagaagcaacctgacaccacctttttcntcccaccctgaaggtgttctttgatcaggtctttttgaactaatgaattgcctggttttagacctcttaacctctaggaacccattatgggcaagcctctgtaaacaactggatgttttagccatcgttcttgtctttttagttgtgaacctagccttgcatggctgagccatctatttagcccttagttcatgacaaagaactttaccatgaacagtgtttccctttagcagagatggctcatacagtccttcccccatatccctatattacattgtggtgaatgagaatggcccataggctcatatctcctcctcctccttcctcttcctcctcctccttcctctcctcctcctcntcttcctcctccttctctcctcctcctccttcctcttctcttctccccctccttctcctttctgaaatctcttatgctgacnaatgttgaaaacaaaattgtcnggtggnattgtggtcaaatctgggtgttgaaaggacnctgccccactgnccaaaaatnggccccatnttgtctgaatntcagaanntttcnctatctcngntntggccccaaccacatttttccggaannggntccctctcnaaaccctgtgggnncagaaccnntgaatgntcntcccctcctngnacngggggagancnttttnggttacttcananttcc

SEQ ID NO: 229 - DNA, 1049 bp, Artificial Sequence
  Description of Artificial Sequence: Note = Synthetic Construct
  misc_feature (555)..(555): n is a, c, g, or t
  misc_feature (636)..(636): n is a, c, g, or t
  misc_feature (652)..(652): n is a, c, g, or t
  misc_feature (683)..(683): n is a, c, g, or t
  misc_feature (697)..(697): n is a, c, g, or t
  misc_feature (762)..(762): n is a, c, g, or t
  misc_feature (791)..(791): n is a, c, g, or t
  misc_feature (798)..(798): n is a, c, g, or t
  misc_feature (836)..(836): n is a, c, g, or t
  misc_feature (883)..(883): n is a, c, g, or t
  misc_feature (902)..(903): n is a, c, g, or t
  misc_feature (906)..(906): n is a, c, g, or t
  misc_feature (950)..(950): n is a, c, g, or t
  misc_feature (965)..(965): n is a, c, g, or t
  misc_feature (974)..(974): n is a, c, g, or t
  misc_feature (976)..(976): n is a, c, g, or t
  misc_feature (982)..(982): n is a, c, g, or t
  misc_feature (986)..(986): n is a, c, g, or t
  misc_feature (989)..(989): n is a, c, g, or t
  misc_feature (998)..(998): n is a, c, g, or t
  misc_feature (1003)..(1003): n is a, c, g, or t
  misc_feature (1006)..(1006): n is a, c, g, or t
  misc_feature (1011)..(1011): n is a, c, g, or t
  misc_feature (1035)..(1035): n is a, c, g, or t
  misc_feature (1042)..(1042): n is a, c, g, or t
cattcacactttaattcaggccccaagcaaccacataaagggctcacgaccacctgtaatgggatctgatgtccccttctggtgagtctgaagacagcgacaacgtactcatatatattaaataaataaataaatcttaaaaaaaaaatagagggggttggggatttagctcagtggtagagcgcttgcctagcaaacgcaaggtcctgggttcggtccccagctccggaaaaaagaaaaagaaaaaaaaaaatagagagttagaatttaatggtagtctcaggtaaagaaaatgatgacattttagaaattggtggtagtggtggtggtcgtcgtacaatattccaaatgtgctaaatgctacagaccctgtatctcatgaaatatgaaatgtacagtttagcaccactaaaaaaacaaacaaatgaaacaaaaccaaacaaaacaaaacaaaacaaaaacaaacaaacaaacaaaaaaaccccagcaaactctggctctgcctaacattaccaaggcggcactgtcttttgagtttgtagcacctcagagcangtttatgctccggagttcacctgggtctctctccaatagcatctttccttgtctcctggtaatttgtgagaacctcctgangaagggcgtttatcancagagccttctccaagtggattccggaattntaaaaaccgagatnacacgattacgttaaaactccgtcaggaggttgggttgaaatctggccctcagtctccttcccanaacaatgtgaccaacactgttactacaantcccggnaaccgcaaggcaatctggttattatcaaacccctgatnacaaaaccacgccggctgatcctccatgagggaaaaattcccccctnaacaattggctaaaccctnnttnacctaaggcctgcggggaaactaaacttcaaaccgtttttaaanaacctacctttttanccctggaananacggcnttancanacaacaacnaccanaancccanccagggtttcctattggaaggganattgganacggttg

SEQ ID NO: 230 - DNA, 864 bp, Artificial Sequence
  Description of Artificial Sequence: Note = Synthetic Construct
  misc_feature (35)..(35): n is a, c, g, or t
  misc_feature (37)..(37): n is a, c, g, or t
  misc_feature (40)..(40): n is a, c, g, or t
  misc_feature (48)..(48): n is a, c, g, or t
  misc_feature (52)..(52): n is a, c, g, or t
  misc_feature (57)..(57): n is a, c, g, or t
  misc_feature (63)..(63): n is a, c, g, or t
  misc_feature (72)..(72): n is a, c, g, or t
  misc_feature (117)..(117): n is a, c, g, or t
  misc_feature (124)..(124): n is a, c, g, or t
  misc_feature (136)..(137): n is a, c, g, or t
  misc_feature (156)..(156): n is a, c, g, or t
  misc_feature (159)..(159): n is a, c, g, or t
  misc_feature (164)..(164): n is a, c, g, or t
  misc_feature (170)..(170): n is a, c, g, or t
  misc_feature (174)..(174): n is a, c, g, or t
  misc_feature (176)..(176): n is a, c, g, or t
  misc_feature (180)..(180): n is a, c, g, or t
  misc_feature (182)..(183): n is a, c, g, or t
  misc_feature (189)..(189): n is a, c, g, or t
  misc_feature (206)..(206): n is a, c, g, or t
  misc_feature (216)..(216): n is a, c, g, or t
  misc_feature (224)..(224): n is a, c, g, or t
  misc_feature (235)..(235): n is a, c, g, or t
  misc_feature (240)..(240): n is a, c, g, or t
  misc_feature (250)..(250): n is a, c, g, or t
  misc_feature (253)..(253): n is a, c, g, or t
  misc_feature (257)..(257): n is a, c, g, or t
  misc_feature (264)..(264): n is a, c, g, or t
  misc_feature (290)..(291): n is a, c, g, or t
  misc_feature (313)..(313): n is a, c, g, or t
  misc_feature (318)..(318): n is a, c, g, or t
  misc_feature (332)..(332): n is a, c, g, or t
  misc_feature (349)..(349): n is a, c, g, or t
  misc_feature (351)..(351): n is a, c, g, or t
  misc_feature (360)..(360): n is a, c, g, or t
  misc_feature (377)..(377): n is a, c, g, or t
  misc_feature (380)..(381): n is a, c, g, or t
  misc_feature (392)..(392): n is a, c, g, or t
  misc_feature (408)..(408): n is a, c, g, or t
  misc_feature (424)..(424): n is a, c, g, or t
  misc_feature (435)..(435): n is a, c, g, or t
  misc_feature (437)..(437): n is a, c, g, or t
  misc_feature (445)..(445): n is a, c, g, or t
  misc_feature (455)..(455): n is a, c, g, or t
  misc_feature (459)..(459): n is a, c, g, or t
  misc_feature (467)..(467): n is a, c, g, or t
  misc_feature (472)..(472): n is a, c, g, or t
  misc_feature (477)..(477): n is a, c, g, or t
  misc_feature (483)..(483): n is a, c, g, or t
  misc_feature (486)..(486): n is a, c, g, or t
  misc_feature (495)..(495): n is a, c, g, or t
  misc_feature (511)..(511): n is a, c, g, or t
  misc_feature (519)..(520): n is a, c, g, or t
  misc_feature (531)..(531): n is a, c, g, or t
  misc_feature (563)..(563): n is a, c, g, or t
  misc_feature (566)..(566): n is a, c, g, or t
  misc_feature (569)..(569): n is a, c, g, or t
  misc_feature (578)..(578): n is a, c, g, or t
  misc_feature (580)..(581): n is a, c, g, or t
  misc_feature (601)..(601): n is a, c, g, or t
  misc_feature (607)..(607): n is a, c, g, or t
  misc_feature (611)..(611): n is a, c, g, or t
  misc_feature (619)..(619): n is a, c, g, or t
  misc_feature (636)..(636): n is a, c, g, or t
  misc_feature (642)..(642): n is a, c, g, or t
  misc_feature (654)..(654): n is a, c, g, or t
  misc_feature (659)..(659): n is a, c, g, or t
  misc_feature (665)..(665): n is a, c, g, or t
  misc_feature (683)..(683): n is a, c, g, or t
  misc_feature (687)..(687): n is a, c, g, or t
  misc_feature (694)..(694): n is a, c, g, or t
  misc_feature (696)..(696): n is a, c, g, or t
  misc_feature (698)..(698): n is a, c, g, or t
  misc_feature (735)..(735): n is a, c, g, or t
  misc_feature (761)..(761): n is a, c, g, or t
  misc_feature (765)..(766): n is a, c, g, or t
  misc_feature (768)..(768): n is a, c, g, or t
  misc_feature (775)..(775): n is a, c, g, or t
  misc_feature (777)..(777): n is a, c, g, or t
  misc_feature (783)..(785): n is a, c, g, or t
  misc_feature (793)..(793): n is a, c, g, or t
  misc_feature (808)..(808): n is a, c, g, or t
  misc_feature (820)..(820): n is a, c, g, or t
  misc_feature (834)..(834): n is a, c, g, or t
  misc_feature (845)..(845): n is a, c, g, or t
  misc_feature (848)..(848): n is a, c, g, or t
  misc_feature (850)..(850): n is a, c, g, or t
ctaatcaatgggtccttaggaaaacgcgcttgtangnctngtcctttnaaanattancaacantttgggganccgaatctgagtatcatggtgaattctgtgaattccctattggangtgctgntatgattctgcnnacctacatataaccactcnttnatgancggcantccntntgtncnngtgaanacaaaataaccaatatntacagtcagncttaaacnctatatacatngggangttcatgctntangtcncgtcganggggtgtgctgtttgtacaataattnnagctacctgtacacagcgacantcttnaccttctttgaggnggtcaaagcaatatgtncngtggtaggngtgtaatgtttgtccanttnnttgaactactntgcagtttgagggacnatcccattgtaactantgcataaatgnantcaatagntaagtatccncgtnacacccanttttnggtantgaaanacnagaatatangggataaccaccatgntggccacnnccccatgtcantccttaacccccaccttgtcatccttggtttngtnatnctggggaananntggttgggtccccaacatcnggcctnccgnaaattaancctttctcacaactccnaagctngttcgaaccccngcccnacgganggtccaaaagcttccccnatantcccccnangntctggttgccaagcttttttgatccccccttgaaaanaatccccccggttccctttattcttnccgnnangcgcccncnaaaatnnnaaaccttncctttttcccccttnatttgaattcgnggaccccctcttanccctaacctcngtntnacctgcctgatggc

SEQ ID NO: 231 - DNA, 1036 bp, Artificial Sequence
  Description of Artificial Sequence: Note = Synthetic Construct
  misc_feature (4)..(4): n is a, c, g, or t
  misc_feature (17)..(17): n is a, c, g, or t
  misc_feature (20)..(20): n is a, c, g, or t
  misc_feature (24)..(24): n is a, c, g, or t
  misc_feature (49)..(49): n is a, c, g, or t
  misc_feature (71)..(71): n is a, c, g, or t
  misc_feature (328)..(328): n is a, c, g, or t
  misc_feature (353)..(353): n is a, c, g, or t
  misc_feature (362)..(362): n is a, c, g, or t
  misc_feature (421)..(421): n is a, c, g, or t
  misc_feature (462)..(462): n is a, c, g, or t
  misc_feature (482)..(482): n is a, c, g, or t
  misc_feature (545)..(545): n is a, c, g, or t
  misc_feature (551)..(551): n is a, c, g, or t
  misc_feature (561)..(561): n is a, c, g, or t
  misc_feature (581)..(581): n is a, c, g, or t
  misc_feature (624)..(624): n is a, c, g, or t
  misc_feature (638)..(638): n is a, c, g, or t
  misc_feature (643)..(643): n is a, c, g, or t
  misc_feature (652)..(652): n is a, c, g, or t
  misc_feature (658)..(658): n is a, c, g, or t
  misc_feature (674)..(674): n is a, c, g, or t
  misc_feature (676)..(676): n is a, c, g, or t
  misc_feature (688)..(688): n is a, c, g, or t
  misc_feature (701)..(701): n is a, c, g, or t
  misc_feature (732)..(732): n is a, c, g, or t
  misc_feature (734)..(734): n is a, c, g, or t
  misc_feature (747)..(747): n is a, c, g, or t
  misc_feature (761)..(761): n is a, c, g, or t
  misc_feature (771)..(771): n is a, c, g, or t
  misc_feature (774)..(774): n is a, c, g, or t
  misc_feature (790)..(790): n is a, c, g, or t
  misc_feature (806)..(806): n is a, c, g, or t
  misc_feature (813)..(813): n is a, c, g, or t
  misc_feature (816)..(816): n is a, c, g, or t
  misc_feature (822)..(822): n is a, c, g, or t
  misc_feature (827)..(827): n is a, c, g, or t
  misc_feature (839)..(839): n is a, c, g, or t
  misc_feature (845)..(845): n is a, c, g, or t
  misc_feature (851)..(851): n is a, c, g, or t
  misc_feature (854)..(854): n is a, c, g, or t
  misc_feature (887)..(887): n is a, c, g, or t
  misc_feature (889)..(889): n is a, c, g, or t
  misc_feature (896)..(896): n is a, c, g, or t
  misc_feature (900)..(901): n is a, c, g, or t
  misc_feature (910)..(910): n is a, c, g, or t
  misc_feature (924)..(924): n is a, c, g, or t
  misc_feature (928)..(929): n is a, c, g, or t
  misc_feature (938)..(938): n is a, c, g, or t
  misc_feature (943)..(943): n is a, c, g, or t
  misc_feature (951)..(951): n is a, c, g, or t
  misc_feature (953)..(953): n is a, c, g, or t
  misc_feature (959)..(959): n is a, c, g, or t
  misc_feature (961)..(961): n is a, c, g, or t
  misc_feature (967)..(968): n is a, c, g, or t
  misc_feature (970)..(970): n is a, c, g, or t
  misc_feature (975)..(975): n is a, c, g, or t
  misc_feature (995)..(995): n is a, c, g, or t
  misc_feature (997)..(997): n is a, c, g, or t
  misc_feature (1005)..(1005): n is a, c, g, or t
  misc_feature (1007)..(1008): n is a, c, g, or t
  misc_feature (1013)..(1013): n is a, c, g, or t
  misc_feature (1017)..(1017): n is a, c, g, or t
  misc_feature (1019)..(1019): n is a, c, g, or t
  misc_feature (1022)..(1024): n is a, c, g, or t
  misc_feature (1026)..(1027): n is a, c, g, or t
  misc_feature (1031)..(1031): n is a, c, g, or t
  misc_feature (1034)..(1034): n is a, c, g, or t
attnaactttattcttnccnctcnccacctttaaatatgtatttaaatnaccgacggcgtccccgccccangggcccctgctcacctggatccaggagccacgggggggccctcgaaagtcgccctcagccaggctgggggggagcacggaatccggggtgtcaacccccccggaagccaagaaggcgttgggggaaggggcgtagcccccagcccctcccttccctagccgctgggggtgggggaaagcatcggggccgcgcggccacgtcagcagccctcggactggctgggccgggtcacgtgtccgctccccccacggcacganggcgaagtttccgaacactgccganggtcgtgtncggggtcacaggggctgcacggctcagacatgcgtcccgagaccccagacctcgccaangctgctgcctcgccaagtccccggcctcccgcgcggccgtngtcgcccccgtcccccccantcgcctctcggtacgggttaacatggctgccacagccccaagatcacaaagcgcatgcgtaanggtgtncctggcctgngggaagggaagcacgggtcncgccgagaaccctgatgctcaagctcaatctgccccaaacctnggggcccaaccgcngcgcnccctgggtntttgcnggaaccccccggcctncncccggacggttntccccgccccgantccctccgcggcggcgggaataggtcctccngntcccgtctaaagncgttcctggcaacnttttgacaanatncgcgggtccccttctnttgtccccggaaggancccgggnctncctgcnatacnggttttcagggnaacctnccttgnacngtaaggtccgttttgggtttcaacccccggttnantttttancccnnggaattttngggtccccaatttnaaanngcttttccnttttnaattaaananccaaancngctttnntnaaaanccccctttgtttggaactantnaggttttncnntttanaaangnttnnncnnttcncgncc

SEQ ID NO: 232 - DNA, 1048 bp, Artificial Sequence
  Description of Artificial Sequence: Note = Synthetic Construct
  misc_feature (31)..(31): n is a, c, g, or t
  misc_feature (36)..(36): n is a, c, g, or t
  misc_feature (56)..(56): n is a, c, g, or t
  misc_feature (652)..(652): n is a, c, g, or t
  misc_feature (667)..(667): n is a, c, g, or t
  misc_feature (731)..(731): n is a, c, g, or t
  misc_feature (747)..(748): n is a, c, g, or t
  misc_feature (756)..(756): n is a, c, g, or t
  misc_feature (764)..(764): n is a, c, g, or t
  misc_feature (804)..(804): n is a, c, g, or t
  misc_feature (807)..(807): n is a, c, g, or t
  misc_feature (840)..(840): n is a, c, g, or t
  misc_feature (850)..(850): n is a, c, g, or t
  misc_feature (861)..(861): n is a, c, g, or t
  misc_feature (876)..(876): n is a, c, g, or t
  misc_feature (878)..(878): n is a, c, g, or t
  misc_feature (885)..(885): n is a, c, g, or t
  misc_feature (904)..(904): n is a, c, g, or t
  misc_feature (955)..(955): n is a, c, g, or t
  misc_feature (958)..(958): n is a, c, g, or t
  misc_feature (961)..(961): n is a, c, g, or t
  misc_feature (969)..(969): n is a, c, g, or t
  misc_feature (972)..(972): n is a, c, g, or t
  misc_feature (998)..(998): n is a, c, g, or t
  misc_feature (1016)..(1016): n is a, c, g, or t
  misc_feature (1021)..(1022): n is a, c, g, or t
  misc_feature (1026)..(1026): n is a, c, g, or t
  misc_feature (1033)..(1033): n is a, c, g, or t
  misc_feature (1035)..(1037): n is a, c, g, or t
  misc_feature (1039)..(1039): n is a, c, g, or t
catttcacactttaattcaggcccgcagaanaacanctaaaagacctgggaaaacnagtcagtatggaaaggcaggaggtaggaggctggcatattttgctcacagaaccatgaattgagcaatgtaggggtggggccataagggaggcaaggacagacagacagacagacagacagacagacacacacacacacacacacacacacacacacacacacacacacacacacacacaaacacacacaccacccaaaacccaaacaaaacaataacaaaacaatcaataatggagtttagaaaaagcctgccagaccagaaagaaggcagggtcagaatatgcaaacactgtggacatcaaaccactttggaaggtgattataatgttttaagtacaggaaaataaagtcctttactgcaggagtgaagaaaagactaggaaaaaaaaatggttaaaggacctggctgtcctggcaatgagagagaaatggacggtggtacagtcctggttctcccaagccagcggatagagcaagaaggacttggaacctggtctctgtctgactcaagaagaataccaaaagtttcaagtgtttagcatttctatacacccctacttataaatgaaggaacggaacagttcacggagcatangggcaaggattgaanttgtacttctacagcctgcatggtaaatggtgaaggtagctttttggctccaaactgaacctcngtggtaaaaaagtccnnatgttgantgagtccntggcaaacattccaactgcagctcaggtaaacagagccancangcattcccaagaaaaagcaactgtgtcctgaanggctttcccnaaaagccttgnaaactgctgcttatnangctttangcaagcaacaacctggggntttggaagacacaggcaagcccttggataaccccctgtggggtcattgctncanatnaggcaccntgnaaacaattttcctcccgggttccccncaacccttgtaaaaaggnccatnncacncccaacnannncnaaaaatttg

SEQ ID NO: 233 - DNA, 943 bp, Artificial Sequence
  Description of Artificial Sequence: Note = Synthetic Construct
  misc_feature (2)..(2): n is a, c, g, or t
  misc_feature (14)..(14): n is a, c, g, or t
  misc_feature (25)..(25): n is a, c, g, or t
  misc_feature (30)..(30): n is a, c, g, or t
  misc_feature (32)..(32): n is a, c, g, or t
  misc_feature (37)..(37): n is a, c, g, or t
  misc_feature (40)..(41): n is a, c, g, or t
  misc_feature (53)..(53): n is a, c, g, or t
  misc_feature (220)..(220): n is a, c, g, or t
  misc_feature (409)..(409): n is a, c, g, or t
  misc_feature (533)..(533): n is a, c, g, or t
  misc_feature (562)..(562): n is a, c, g, or t
  misc_feature (649)..(649): n is a, c, g, or t
  misc_feature (670)..(670): n is a, c, g, or t
  misc_feature (716)..(716): n is a, c, g, or t
  misc_feature (722)..(722): n is a, c, g, or t
  misc_feature (737)..(737): n is a, c, g, or t
  misc_feature (752)..(752): n is a, c, g, or t
  misc_feature (756)..(756): n is a, c, g, or t
  misc_feature (762)..(762): n is a, c, g, or t
  misc_feature (764)..(764): n is a, c, g, or t
  misc_feature (807)..(807): n is a, c, g, or t
  misc_feature (810)..(810): n is a, c, g, or t
  misc_feature (815)..(815): n is a, c, g, or t
  misc_feature (820)..(820): n is a, c, g, or t
  misc_feature (824)..(824): n is a, c, g, or t
  misc_feature (841)..(841): n is a, c, g, or t
  misc_feature (844)..(844): n is a, c, g, or t
  misc_feature (847)..(848): n is a, c, g, or t
  misc_feature (853)..(854): n is a, c, g, or t
  misc_feature (857)..(857): n is a, c, g, or t
  misc_feature (873)..(873): n is a, c, g, or t
  misc_feature (888)..(888): n is a, c, g, or t
  misc_feature (907)..(907): n is a, c, g, or t
  misc_feature (919)..(919): n is a, c, g, or t
cnacttttctactngccaatgcctnttatncnactanagnnttttattccaancgtgaaaaatttttcccatatcccgaacagtccactcattactactgcggcctactgggaaactaaccgaattcatatctgaaaaactaaaaaatacaagcataggtcagttttgccagaaaccaggactcaaggaaaggagggttaggaaggaagataaaaacacncagggaccataccaaggcctgctcagcaggaagcaagggggacggaaggggctggacaggcccatgaaggaaagcatcttcctcccagacacttcaagttcagaatggcttccttctgccatgtagacctggccaagtaacccaagtcctttcaaaggagccagaatgccttgcacagaagttggagangaagccagtggtaaacgtgtgcattcctacgggaaggcaccttgaccacctgaagtcaaagaaaactgttatctaaataattaccatctgaaccctggctgttataagctggaatccttcccangaatctgaaggaaaataaacaacacagcnaacatagcgagcacctgtgggtgaagaaatctttgggaaagtgtgaagggttagacacaatcccaactgtcactgcacctcccacanccaattgaagtacacctggtntttctcctcctctttcaccgcccaaaaccagttttatattgatatntgatcntccaaacctaactantgacaggaatacaanaacnctatcntncggataggaaaaatcccccctcaggtccgtttcattcccgttngcncgtcnacttnctcnttcaaaaggcaaaaggnccnggnngattnntcncagggccaaaccatcnggaatcctatctcgncccccccattctttccccnaaaaaccaattnccaaactttttttagggttccgaa

SEQ ID NO: 234 - DNA, 1035 bp, Artificial Sequence
  Description of Artificial Sequence: Note = Synthetic Construct
  misc_feature (18)..(18): n is a, c, g, or t
  misc_feature (20)..(20): n is a, c, g, or t
  misc_feature (23)..(23): n is a, c, g, or t
  misc_feature (32)..(32): n is a, c, g, or t
  misc_feature (45)..(45): n is a, c, g, or t
  misc_feature (48)..(48): n is a, c, g, or t
  misc_feature (51)..(51): n is a, c, g, or t
  misc_feature (56)..(56): n is a, c, g, or t
  misc_feature (58)..(59): n is a, c, g, or t
  misc_feature (65)..(65): n is a, c, g, or t
  misc_feature (69)..(70): n is a, c, g, or t
  misc_feature (75)..(75): n is a, c, g, or t
  misc_feature (79)..(79): n is a, c, g, or t
  misc_feature (86)..(88): n is a, c, g, or t
  misc_feature (91)..(91): n is a, c, g, or t
  misc_feature (108)..(109): n is a, c, g, or t
  misc_feature (112)..(113): n is a, c, g, or t
  misc_feature (120)..(120): n is a, c, g, or t
  misc_feature (132)..(132): n is a, c, g, or t
  misc_feature (135)..(135): n is a, c, g, or t
  misc_feature (138)..(140): n is a, c, g, or t
  misc_feature (144)..(144): n is a, c, g, or t
  misc_feature (147)..(147): n is a, c, g, or t
  misc_feature (168)..(168): n is a, c, g, or t
  misc_feature (172)..(172): n is a, c, g, or t
  misc_feature (174)..(176): n is a, c, g, or t
  misc_feature (180)..(180): n is a, c, g, or t
  misc_feature (192)..(192): n is a, c, g, or t
  misc_feature (194)..(194): n is a, c, g, or t
  misc_feature (197)..(197): n is a, c, g, or t
  misc_feature (212)..(212): n is a, c, g, or t
  misc_feature (223)..(224): n is a, c, g, or t
  misc_feature (235)..(235): n is a, c, g, or t
  misc_feature (239)..(239): n is a, c, g, or t
  misc_feature (241)..(241): n is a, c, g, or t
  misc_feature (246)..(246): n is a, c, g, or t
  misc_feature (263)..(263): n is a, c, g, or t
  misc_feature (267)..(267): n is a, c, g, or t
  misc_feature (273)..(273): n is a, c, g, or t
  misc_feature (275)..(276): n is a, c, g, or t
  misc_feature (284)..(284): n is a, c, g, or t
  misc_feature (307)..(307): n is a, c, g, or t
  misc_feature (332)..(332): n is a, c, g, or t
  misc_feature (347)..(347): n is a, c, g, or t
  misc_feature (357)..(357): n is a, c, g, or t
  misc_feature (365)..(365): n is a, c, g, or t
  misc_feature (367)..(368): n is a, c, g, or t
  misc_feature (371)..(371): n is a, c, g, or t
  misc_feature (373)..(373): n is a, c, g, or t
  misc_feature (377)..(377): n is a, c, g, or t
  misc_feature (382)..(382): n is a, c, g, or t
  misc_feature (393)..(393): n is a, c, g, or t
  misc_feature (395)..(395): n is a, c, g, or t
  misc_feature (405)..(405): n is a, c, g, or t
  misc_feature (413)..(413): n is a, c, g, or t
  misc_feature (419)..(421): n is a, c, g, or t
  misc_feature (428)..(428): n is a, c, g, or t
  misc_feature (432)..(432): n is a, c, g, or t
  misc_feature (435)..(435): n is a, c, g, or t
  misc_feature (438)..(438): n is a, c, g, or t
  misc_feature (444)..(444): n is a, c, g, or t
  misc_feature (449)..(449): n is a, c, g, or t
  misc_feature (454)..(454): n is a, c, g, or t
  misc_feature (457)..(457): n is a, c, g, or t
  misc_feature (474)..(475): n is a, c, g, or t
  misc_feature (482)..(482): n is a, c, g, or t
  misc_feature (488)..(489): n is a, c, g, or t
  misc_feature (497)..(497): n is a, c, g, or t
  misc_feature (518)..(518): n is a, c, g, or t
  misc_feature (522)..(522): n is a, c, g, or t
  misc_feature (524)..(527): n is a, c, g, or t
  misc_feature (532)..(532): n is a, c, g, or t
  misc_feature (537)..(537): n is a, c, g, or t
  misc_feature (545)..(545): n is a, c, g, or t
  misc_feature (554)..(554): n is a, c, g, or t
  misc_feature (562)..(562): n is a, c, g, or t
  misc_feature (574)..(574): n is a, c, g, or t
  misc_feature (583)..(583): n is a, c, g, or t
  misc_feature (595)..(595): n is a, c, g, or t
  misc_feature (606)..(606): n is a, c, g, or t
  misc_feature (610)..(610): n is a, c, g, or t
  misc_feature (612)..(612): n is a, c, g, or t
  misc_feature (628)..(628): n is a, c, g, or t
  misc_feature (637)..(637): n is a, c, g, or t
  misc_feature (641)..(641): n is a, c, g, or t
  misc_feature (660)..(660): n is a, c, g, or t
  misc_feature (679)..(679): n is a, c, g, or t
  misc_feature (687)..(687): n is a, c, g, or t
  misc_feature (702)..(703): n is a, c, g, or t
  misc_feature (729)..(729): n is a, c, g, or t
  misc_feature (731)..(732): n is a, c, g, or t
  misc_feature (735)..(735): n is a, c, g, or t
  misc_feature (745)..(746): n is a, c, g, or t
  misc_feature (748)..(748): n is a, c, g, or t
  misc_feature (751)..(751): n is a, c, g, or t
  misc_feature (755)..(755): n is a, c, g, or t
  misc_feature (760)..(760): n is a, c, g, or t
  misc_feature (764)..(765): n is a, c, g, or t
  misc_feature (796)..(796): n is a, c, g, or t
  misc_feature (809)..(809): n is a, c, g, or t
  misc_feature (813)..(813): n is a, c, g, or t
  misc_feature (817)..(818): n is a, c, g, or t
  misc_feature (822)..(823): n is a, c, g, or t
  misc_feature (828)..(828): n is a, c, g, or t
  misc_feature (843)..(843): n is a, c, g, or t
  misc_feature (861)..(861): n is a, c, g, or t
  misc_feature (868)..(868): n is a, c, g, or t
  misc_feature (871)..(871): n is a, c, g, or t
  misc_feature (874)..(874): n is a, c, g, or t
  misc_feature (882)..(882): n is a, c, g, or t
  misc_feature (891)..(891): n is a, c, g, or t
  misc_feature (902)..(902): n is a, c, g, or t
  misc_feature (907)..(907): n is a, c, g, or t
  misc_feature (909)..(909): n is a, c, g, or t
  misc_feature (913)..(913): n is a, c, g, or t
  misc_feature (917)..(917): n is a, c, g, or t
  misc_feature (920)..(920): n is a, c, g, or t
  misc_feature (922)..(923): n is a, c, g, or t
  misc_feature (933)..(933): n is a, c, g, or t
  misc_feature (935)..(935): n is a, c, g, or t
  misc_feature (939)..(939): n is a, c, g, or t
  misc_feature (953)..(953): n is a, c, g, or t
  misc_feature (955)..(955): n is a, c, g, or t
  misc_feature (961)..(963): n is a, c, g, or t
  misc_feature (972)..(973): n is a, c, g, or t
  misc_feature (979)..(979): n is a, c, g, or t
  misc_feature (982)..(982): n is a, c, g, or t
  misc_feature (992)..(992): n is a, c, g, or t
  misc_feature (997)..(997): n is a, c, g, or t
  misc_feature (999)..(999): n is a, c, g, or t
  misc_feature (1007)..(1007): n is a, c, g, or t
  misc_feature (1009)..(1009): n is a, c, g, or t
  misc_feature (1012)..(1012): n is a, c, g, or t
  misc_feature (1014)..(1014): n is a, c, g, or t
  misc_feature (1016)..(1017): n is a, c, g, or t
  misc_feature (1021)..(1021): n is a, c, g, or t
  misc_feature (1024)..(1024): n is a, c, g, or t
catttcacatttaattcngnccntctgcgcanattaaagctcacntangtnctggnanntccttntganntatcnatcntctgcannnacncgctctcgcggaactcnncgnntctcttnggctctctctcnctntgnnncaantantacacgacatggcactgttcngganannnaaanattttcacgaangnacncaggatttctgggcnacttcacaganncgtcagtgttncacntngttantacggtgctcgatcttnggtnacatcntnnttagctgngactccttttgggaacctagcgngttcagttggttccctaatgggacntgcttgttgactgtncatgtcctgntgtggcgnannttnangganccggntcttgagtatnantgtggaatcngatgtctngctagnnncgagtgnagantgnctncccagnctganatcgnatntatgtctgtaacaacannctcactntcacgnngctcctcncgccactctcacgtctttcanacangnnnncttgnacggnattgacantgcattggnatcacacnctgtctgcaggntatgggccntccaataaaacntttacatccancatntntcctagtaatgcatgngggttggcnttcntgttgttcaagaggacttngactgcccttgcgaatctnagatggtngctgttcctgctgtnngccatccccggtctggactgtcctcngnnggntatcacgccnncnganattncgtgngagnnccacgggcccttcccttgacggtggcgtttnattccaaaacctnttgncccnngggnntccanaatacggttctccgnggcattgacttggcctgngcctttntgntgncctccccngggatgccnttccggtttcnatgcntntaantttncananntcgggcatcngnaggnttggtttgcttaanangttacnnngtatttccnntgtccncanttcctggaanttttnangccaaggncnttncngnngccnaanttttttttttt

SEQ ID NO: 235 - DNA, 584 bp, Artificial Sequence
  Description of Artificial Sequence: Note = Synthetic Construct
  misc_feature (22)..(22): n is a, c, g, or t
  misc_feature (103)..(103): n is a, c, g, or t
  misc_feature (443)..(443): n is a, c, g, or t
  misc_feature (446)..(446): n is a, c, g, or t
  misc_feature (506)..(506): n is a, c, g, or t
  misc_feature (542)..(542): n is a, c, g, or t
tactttaaaagtatttcacagngcaatgtttctcaacctgtgtgtctcgatcccttcccaggcccttattttatgatactttgcctatcagatatgttgcatnttatgacttacaagaacagcaatattagttacaaaggcgcaatgaaataattttatggtgggggtcaccacagcatgaagatctgtattaaagggtgcatcattaggagtgatttgagccactgccatagaagctgacacatgggagcagactcctcagatgagtagagacccacagcaagtgatactgtgtcccaccctagaacccagagatagaatctatcccaggagtctgtgggtcaccttgtcttaaattcttccagggtcaagaatagcattgatcatctcagcagaatcagcttgcacagcccacatcaggcccatggcttccctgtacagancangatgtgggtctaagtgacagcccgtgagactgaagggacctgatactcatttgctttgancagtggttctccactgtaaaatgggggtgttctgcngaattgggttgttgtggaaataacaaaacatacactgccatg

SEQ ID NO: 236 - DNA, 494 bp, Artificial Sequence
  Description of Artificial Sequence: Note = Synthetic Construct
ggagaactaaaatgacttatatttgcagaaaacacattgacataaatttgttcaatcaaaggactttcccccttagaggtagttaagattaaccacaccaagaaaatggcagtgttcctgaggcaaatgtaaatggaaacattctaatccagaaggcaaactgacactaactggtgcctgccatgttccaaacccacacagctcacagaaaagtagatgccattgtcttgacttgatagatgaggaaacgaaggattggccaggaagaaccagaagtgaagaggctgggatggggctggacagaggtgcttagctgagccaaagccacaacatggaaggaagtatcctgagcaatgtttctcaacctgtgagtctcgacccctttgctactgctctgtgcttagggaagtccctctcttgatcatagtaggtcctcaatccaaggctatcttggaaggaatgacagggatgtatgaccatgtctgcatgttccc

SEQ ID NO: 237 - DNA, 929 bp, Artificial Sequence
  Description of Artificial Sequence: Note = Synthetic Construct
  misc_feature (4)..(5): n is a, c, g, or t
  misc_feature (7)..(8): n is a, c, g, or t
  misc_feature (27)..(27): n is a, c, g, or t
  misc_feature (38)..(38): n is a, c, g, or t
  misc_feature (41)..(43): n is a, c, g, or t
  misc_feature (57)..(57): n is a, c, g, or t
  misc_feature (60)..(60): n is a, c, g, or t
  misc_feature (69)..(69): n is a, c, g, or t
  misc_feature (199)..(199): n is a, c, g, or t
  misc_feature (231)..(231): n is a, c, g, or t
  misc_feature (283)..(283): n is a, c, g, or t
  misc_feature (295)..(295): n is a, c, g, or t
  misc_feature (319)..(319): n is a, c, g, or t
  misc_feature (345)..(345): n is a, c, g, or t
  misc_feature (354)..(354): n is a, c, g, or t
  misc_feature (364)..(364): n is a, c, g, or t
  misc_feature (390)..(390): n is a, c, g, or t
  misc_feature (396)..(397): n is a, c, g, or t
  misc_feature (442)..(442): n is a, c, g, or t
  misc_feature (444)..(444): n is a, c, g, or t
  misc_feature (474)..(474): n is a, c, g, or t
  misc_feature (508)..(508): n is a, c, g, or t
  misc_feature (542)..(542): n is a, c, g, or t
  misc_feature (555)..(555): n is a, c, g, or t
  misc_feature (558)..(558): n is a, c, g, or t
  misc_feature (591)..(591): n is a, c, g, or t
  misc_feature (594)..(594): n is a, c, g, or t
  misc_feature (601)..(601): n is a, c, g, or t
  misc_feature (608)..(608): n is a, c, g, or t
  misc_feature (625)..(625): n is a, c, g, or t
  misc_feature (631)..(631): n is a, c, g, or t
  misc_feature (634)..(634): n is a, c, g, or t
  misc_feature (638)..(638): n is a, c, g, or t
  misc_feature (653)..(653): n is a, c, g, or t
  misc_feature (656)..(656): n is a, c, g, or t
  misc_feature (661)..(661): n is a, c, g, or t
  misc_feature (665)..(665): n is a, c, g, or t
  misc_feature (678)..(678): n is a, c, g, or t
  misc_feature (689)..(690): n is a, c, g, or t
  misc_feature (715)..(715): n is a, c, g, or t
  misc_feature (719)..(719): n is a, c, g, or t
  misc_feature (748)..(748): n is a, c, g, or t
  misc_feature (769)..(769): n is a, c, g, or t
  misc_feature (778)..(778): n is a, c, g, or t
  misc_feature (788)..(788): n is a, c, g, or t
  misc_feature (792)..(792): n is a, c, g, or t
  misc_feature (802)..(802): n is a, c, g, or t
  misc_feature (816)..(816): n is a, c, g, or t
  misc_feature (820)..(820): n is a, c, g, or t
  misc_feature (829)..(830): n is a, c, g, or t
  misc_feature (832)..(833): n is a, c, g, or t
  misc_feature (851)..(851): n is a, c, g, or t
  misc_feature (862)..(862): n is a, c, g, or t
  misc_feature (869)..(869): n is a, c, g, or t
  misc_feature (894)..(894): n is a, c, g, or t
  misc_feature (907)..(907): n is a, c, g, or t
  misc_feature (919)..(919): n is a, c, g, or t
  misc_feature (927)..(927): n is a, c, g, or t
caanncnntcctctttcagttagtgcntcctttgaaanaannngtaataacggcccnatncaagaaaanagcaacgttttaaaaactgaaacactgtttctttgtgaattccagaggtgttccagctttggaagataagtgaggcaggctgttttcttttctacctttgtttccattctccacctcccacatttaagcnagttcaggactgactctttgacagaggtgtangattaaaaagctcggagacttgacaggctttaaaaaaaacatagcggaaganggaatgacagangcgggttcttacagactgtgtccntgtggctttccagctggtaaccagangttctgtcncaggtgtttnttgtcttgcagacccgggttcctcanattccnnatatcaggctgaattgcctgaagttgcacagttcgttatggggtncngacaaaatcttatggtagcgtttaactacntagtttgagttcttaaataagtgaagcatatgtnaatgttttatatcatctgataacttccacagccntgtgaaatgtccngtnctattatactcgtttttaagaaaagaaatcccnganaaatcantgtcccnaggcccccccctccganactttngancccnattgaaaccctaganaanatttnttanaacaggaaatttncccctcccccnncccccaatttttaccctggtgaaanattngggtttgggatcccgtatgaggatctgtntccgtttctcccaaggatttntgatttccnttcggcccanttcngttccactcnggaatcggattgcnttcnttttctcgnngnngttcttcccccaaattanggactcgggcngtccccnccccctccgggatctttcaaccccntgcccggttcccnggttccctcccntggttccncc

SEQ ID NO: 238 - DNA, 1039 bp, Artificial Sequence
  Description of Artificial Sequence: Note = Synthetic Construct
  misc_feature (4)..(6): n is a, c, g, or t
  misc_feature (9)..(9): n is a, c, g, or t
  misc_feature (22)..(23): n is a, c, g, or t
  misc_feature (27)..(27): n is a, c, g, or t
  misc_feature (34)..(34): n is a, c, g, or t
  misc_feature (49)..(49): n is a, c, g, or t
  misc_feature (61)..(61): n is a, c, g, or t
  misc_feature (66)..(66): n is a, c, g, or t
  misc_feature (71)..(71): n is a, c, g, or t
  misc_feature (79)..(80): n is a, c, g, or t
  misc_feature (84)..(85): n is a, c, g, or t
  misc_feature (100)..(100): n is a, c, g, or t
  misc_feature (103)..(103): n is a, c, g, or t
  misc_feature (109)..(109): n is a, c, g, or t
  misc_feature (116)..(117): n is a, c, g, or t
  misc_feature (135)..(135): n is a, c, g, or t
  misc_feature (140)..(140): n is a, c, g, or t
  misc_feature (172)..(172): n is a, c, g, or t
  misc_feature (188)..(190): n is a, c, g, or t
  misc_feature (212)..(212): n is a, c, g, or t
  misc_feature (216)..(216): n is a, c, g, or t
  misc_feature (254)..(254): n is a, c, g, or t
  misc_feature (257)..(257): n is a, c, g, or t
  misc_feature (263)..(263): n is a, c, g, or t
  misc_feature (271)..(271): n is a, c, g, or t
  misc_feature (287)..(287): n is a, c, g, or t
  misc_feature (292)..(292): n is a, c, g, or t
  misc_feature (294)..(294): n is a, c, g, or t
  misc_feature (301)..(301): n is a, c, g, or t
  misc_feature (313)..(313): n is a, c, g, or t
  misc_feature (323)..(323): n is a, c, g, or t
  misc_feature (328)..(328): n is a, c, g, or t
  misc_feature (339)..(339): n is a, c, g, or t
  misc_feature (350)..(350): n is a, c, g, or t
  misc_feature (353)..(353): n is a, c, g, or t
  misc_feature (361)..(361): n is a, c, g, or t
  misc_feature (364)..(364): n is a, c, g, or t
  misc_feature (371)..(371): n is a, c, g, or t
  misc_feature (374)..(374): n is a, c, g, or t
  misc_feature (384)..(386): n is a, c, g, or t
  misc_feature (391)..(392): n is a, c, g, or t
  misc_feature (394)..(394): n is a, c, g, or t
  misc_feature (396)..(396): n is a, c, g, or t
  misc_feature (408)..(408): n is a, c, g, or t
  misc_feature (414)..(414): n is a, c, g, or t
  misc_feature (418)..(418): n is a, c, g, or t
  misc_feature (420)..(420): n is a, c, g, or t
  misc_feature (426)..(426): n is a, c, g, or t
  misc_feature (430)..(430): n is a, c, g, or t
  misc_feature (434)..(434): n is a, c, g, or t
  misc_feature (436)..(436): n is a, c, g, or t
  misc_feature (442)..(442): n is a, c, g, or t
  misc_feature (453)..(453): n is a, c, g, or t
  misc_feature (484)..(484): n is a, c, g, or t
  misc_feature (511)..(511): n is a, c, g, or t
  misc_feature (525)..(525): n is a, c, g, or t
  misc_feature (534)..(534): n is a, c, g, or t
  misc_feature (537)..(537): n is a, c, g, or t
  misc_feature (540)..(540): n is a, c, g, or t
  misc_feature (549)..(549): n is a, c, g, or t
  misc_feature (564)..(564): n is a, c, g, or t
  misc_feature (566)..(566): n is a, c, g, or t
  misc_feature (574)..(574): n is a, c, g, or t
  misc_feature (579)..(580): n is a, c, g, or t
  misc_feature (584)..(584): n is a, c, g, or t
  misc_feature (594)..(594): n is a, c, g, or t
  misc_feature (597)..(597): n is a, c, g, or t
  misc_feature (611)..(611): n is a, c, g, or t
  misc_feature (619)..(620): n is a, c, g, or t
  misc_feature (624)..(624): n is a, c, g, or t
  misc_feature (634)..(634): n is a, c, g, or t
  misc_feature (640)..(640): n is a, c, g, or t
  misc_feature (643)..(643): n is a, c, g, or t
  misc_feature (647)..(647): n is a, c, g, or t
  misc_feature (650)..(650): n is a, c, g, or t
  misc_feature (652)..(652): n is a, c, g, or t
  misc_feature (656)..(656): n is a, c, g, or t
  misc_feature (660)..(660): n is a, c, g, or t
  misc_feature (662)..(663): n is a, c, g, or t
  misc_feature (665)..(665): n is a, c, g, or t
  misc_feature (667)..(667): n is a, c, g, or t
  misc_feature (672)..(672): n is a, c, g, or t
  misc_feature (675)..(676): n is a, c, g, or t
  misc_feature (680)..(680): n is a, c, g, or t
  misc_feature (682)..(682): n is a, c, g, or t
  misc_feature (689)..(689): n is a, c, g, or t
  misc_feature (691)..(691): n is a, c, g, or t
  misc_feature (700)..(701): n is a, c, g, or t
  misc_feature (706)..(706): n is a, c, g, or t
  misc_feature (708)..(708): n is a, c, g, or t
  misc_feature (713)..(713): n is a, c, g, or t
  misc_feature (715)..(715): n is a, c, g, or t
  misc_feature (719)..(720): n is a, c, g, or t
  misc_feature (730)..(730): n is a, c, g, or t
  misc_feature (733)..(734): n is a, c, g, or t
  misc_feature (736)..(736): n is a, c, g, or t
  misc_feature (743)..(743): n is a, c, g, or t
  misc_feature (752)..(752): n is a, c, g, or t
  misc_feature (754)..(754): n is a, c, g, or t
  misc_feature (758)..(758): n is a, c, g, or t
  misc_feature (760)..(762): n is a, c, g, or t
  misc_feature (778)..(778): n is a, c, g, or t
  misc_feature (793)..(793): n is a, c, g, or t
  misc_feature (796)..(796): n is a, c, g, or t
  misc_feature (800)..(800): n is a, c, g, or t
  misc_feature (812)..(812): n is a, c, g, or t
  misc_feature (815)..(816): n is a, c, g, or t
  misc_feature (831)..(832): n is a, c, g, or t
  misc_feature (834)..(835): n is a, c, g, or t
  misc_feature (841)..(841): n is a, c, g, or t
  misc_feature (848)..(848): n is a, c, g, or t
  misc_feature (851)..(851): n is a, c, g, or t
  misc_feature (863)..(863): n is a, c, g, or t
  misc_feature (881)..(881): n is a, c, g, or t
  misc_feature (885)..(885): n is a, c, g, or t
  misc_feature (889)..(889): n is a, c, g, or t
  misc_feature (898)..(898): n is a, c, g, or t
  misc_feature (902)..(902): n is a, c, g, or t
  misc_feature (906)..(906): n is a, c, g, or t
  misc_feature (909)..(909): n is a, c, g, or t
  misc_feature (915)..(916): n is a, c, g, or t
  misc_feature (922)..(922): n is a, c, g, or t
  misc_feature (924)..(925): n is a, c, g, or t
  misc_feature (935)..(935): n is a, c, g, or t
  misc_feature (940)..(940): n is a, c, g, or t
  misc_feature (943)..(943): n is a, c, g, or t
  misc_feature (948)..(948): n is a, c, g, or t
  misc_feature (951)..(951): n is a, c, g, or t
  misc_feature (958)..(958): n is a, c, g, or t
  misc_feature (963)..(964): n is a, c, g, or t
  misc_feature (968)..(968): n is a, c, g, or t
  misc_feature (972)..(972): n is a, c, g, or t
  misc_feature (984)..(984): n is a, c, g, or t
  misc_feature (989)..(989): n is a, c, g, or t
  misc_feature (999)..(999): n is a, c, g, or t
  misc_feature (1002)..(1002): n is a, c, g, or t
  misc_feature (1015)..(1015): n is a, c, g, or t
  misc_feature (1026)..(1026): n is a, c, g, or t
tttnnncgncgttggaaggttnnaccnagggggntccgcaaaccggatngcagaaattttntgggncggtnttggaaanngggnnccttaatggagcggngangaaccntattggnnataaatttagggcgtccnccttnccccctggttggcttcaattgtcttaaagcangccttttggtaatttnnnctaaggcccttcttccttaccncctncgttttttcgggatccccgtggattctaaggcctgctnaantttgancccggaangtccatccttgctggnggggncnttccggncctaccgtaggnttcttgaganagccncagtttgagtncttgcaatgtntcngtcacttnccnggtttgnagngcacttaatnnncgatnnananatttgtcagatnattgangatncnttatgnatgnattncnctgganacatgtcgacntgtcaaagatggaatgccttgtgtgatccanagtgttgatgatccattcttgacttcnctttgattcaatcncaggacagntantgntgagtgtancaggaaagccgtgtnantcgtgaangtggnnatcntgtgcatcancangcatgctgccaagntcaaaccnnttgncatgtgttcntcacanccnaggngangnagtncgtncnngnantggtngannttgncngaatgtngnctgatgccnnaatangnattgnanggtnntccccacatnggnncncgtgttntgaggaatnanaagngnnngaaactgaagccatgngacagcccgatggcntcncttngatgtcgctgancanngtaccaaggttaccnngnngaccangatggantgngaaatgtgatgnggtcgtgagaagagtganggantccntcacgcagnattnaagncantgccannagggancnngaattctcantgaancantgttncgntttcgcnaaaannatgntctntctttgagttanaggcntgttacatgntantcataactgtganggccagtgatnaatgtgtgaattg

SEQ ID NO: 239 - DNA, 859 bp, Artificial Sequence
  Description of Artificial Sequence: Note = Synthetic Construct
  misc_feature (17)..(17): n is a, c, g, or t
  misc_feature (19)..(19): n is a, c, g, or t
  misc_feature (52)..(52): n is a, c, g, or t
  misc_feature (347)..(348): n is a, c, g, or t
  misc_feature (461)..(461): n is a, c, g, or t
  misc_feature (543)..(543): n is a, c, g, or t
  misc_feature (572)..(572): n is a, c, g, or t
  misc_feature (645)..(645): n is a, c, g, or t
  misc_feature (687)..(687): n is a, c, g, or t
  misc_feature (757)..(757): n is a, c, g, or t
  misc_feature (805)..(805): n is a, c, g, or t
  misc_feature (810)..(810): n is a, c, g, or t
  misc_feature (834)..(834): n is a, c, g, or t
  misc_feature (841)..(841): n is a, c, g, or t
  misc_feature (847)..(847): n is a, c, g, or t
ttattcaattttaaatncnaggttgccacttacaaaaattaaaagaaataanccccaaaaggccacagacccaaggctaagccctgcagccaggactagcaggccataaagataaaggagcacaggaaacactgtccaggcaggactggcaagccataaagataaggaaaaggaatgcaggaaccagcctgagttaatgggactgattcatgggatgtctggcaggaagacatctccccccagctcactcagggccatcctccagaccctgataagcccctgacttctaacacatactctttctgctttgttctcactgctatgtttgaatgagccaattatatgtnnccacgccaaaaccccctagctttctctatataaccctctgacttttgagtttcgtggtcgacacctctgtctcctgcgcgggatacgtgtcggcgcggagatctctgtaatangtctcagtaataaacctcgcctttgcttattactccaaaatggtctctctgtgtctggggtccgagattcccaagacttgantaagggtctctctgcatgggatctttcanattcaaggatctttttccctccatccttgtttctctcctatctggtgtaaggggtgaaacaaggttggggganggggctgaagaaggggataaaattgggaaaaaaaaccccaantaccaagactcaagatccgttactggtcaaatgcaaaaaaatcacccaggtaatttacatccagtttgcngtcccctaggtttctaggtcggtccagttaatttgaaaatcaattaanggagncaaattggccctaaaaaccttccncaattcngaattntattacctgcca

SEQ ID NO: 240 - DNA, 1100 bp, Artificial Sequence
  Description of Artificial Sequence: Note = Synthetic Construct
  misc_feature (19)..(19): n is a, c, g, or t
  misc_feature (418)..(418): n is a, c, g, or t
  misc_feature (437)..(437): n is a, c, g, or t
  misc_feature (619)..(619): n is a, c, g, or t
  misc_feature (625)..(625): n is a, c, g, or t
  misc_feature (672)..(672): n is a, c, g, or t
  misc_feature (696)..(696): n is a, c, g, or t
  misc_feature (707)..(707): n is a, c, g, or t
  misc_feature (768)..(768): n is a, c, g, or t
  misc_feature (781)..(781): n is a, c, g, or t
  misc_feature (789)..(789): n is a, c, g, or t
  misc_feature (795)..(795): n is a, c, g, or t
  misc_feature (812)..(812): n is a, c, g, or t
  misc_feature (825)..(825): n is a, c, g, or t
  misc_feature (873)..(873): n is a, c, g, or t
  misc_feature (886)..(886): n is a, c, g, or t
  misc_feature (919)..(919): n is a, c, g, or t
  misc_feature (924)..(924): n is a, c, g, or t
  misc_feature (936)..(936): n is a, c, g, or t
  misc_feature (948)..(949): n is a, c, g, or t
  misc_feature (980)..(980): n is a, c, g, or t
  misc_feature (982)..(982): n is a, c, g, or t
  misc_feature (1006)..(1007): n is a, c, g, or t
  misc_feature (1030)..(1030): n is a, c, g, or t
  misc_feature (1035)..(1037): n is a, c, g, or t
  misc_feature (1055)..(1055): n is a, c, g, or t
  misc_feature (1059)..(1059): n is a, c, g, or t
  misc_feature (1080)..(1080): n is a, c, g, or t
  misc_feature (1094)..(1094): n is a, c, g, or t
catttacacattattcaangccatgcctcaactacaaagaaggtcaaagccttctgggactacatgagactctctacaaataaaacaaaatgaataagaggctcagatagctaaatatataaagactctgtgagtgtaaagtccttcactctcccatgcctggcctggggcgacttgtccatctgactgttggtctgcttcctttgttaaatccctaatgaactagtacacaaatgttgtctgtctggctctttgagccactctagaaaaatttatcaaattctgtacctgttacagtgtgtctctctcttaccaatttaagattattttttaattaaatgactattgtattggagaaaataaaatgcgcaattcagtgcactgactgcagtggccagaagagggcatcagacagatnccttggatctggagttcangccattatgagctgcctcacatgggtactgagaacccagtttcagtcacctgctgagctaattctccaaccctgttcctctttttttaattcatgacatttattaatttctgtgtgcatatgcatgtgtgaacacatatatgggtacacatgccacacatgtgcgtggaagtcagagacaanttacangaatcagttctccccctctacaagtgggcccaagagattaaaatcangttagcatccagctatacctctcntgggcatatanccaaaagatgccccaacatataaaaaagacacgtgctccactatgttcataacaaccttanttataataaccanaaactggnaagaanccaaatgccctcaacanaggaatggtacanaaaatgtggtacatctacacaaatgggatattactcagctatcaaaancaatgactttttnaaattcctaggcaaatggttggaactgggaaanatcancccgattgaggnaacccatcccannaaaacacaatgggatgcacccccttgaaaantntcaattacccaaaaggctgaattnncccaaatgccaaaaaaaatgaancccannngggaacaaaatttaaggntcanccttcttaaaggggaaaaaanacccttgagggaanaaagtg

SEQ ID NO: 241 - DNA, 860 bp, Artificial Sequence
  Description of Artificial Sequence: Note = Synthetic Construct
  misc_feature (6)..(6): n is a, c, g, or t
  misc_feature (10)..(11): n is a, c, g, or t
  misc_feature (18)..(18): n is a, c, g, or t
  misc_feature (22)..(22): n is a, c, g, or t
  misc_feature (33)..(33): n is a, c, g, or t
  misc_feature (50)..(50): n is a, c, g, or t
  misc_feature (486)..(486): n is a, c, g, or t
  misc_feature (606)..(606): n is a, c, g, or t
  misc_feature (635)..(635): n is a, c, g, or t
  misc_feature (650)..(650): n is a, c, g, or t
  misc_feature (671)..(672): n is a, c, g, or t
  misc_feature (694)..(694): n is a, c, g, or t
  misc_feature (703)..(703): n is a, c, g, or t
  misc_feature (731)..(731): n is a, c, g, or t
  misc_feature (736)..(736): n is a, c, g, or t
  misc_feature (774)..(774): n is a, c, g, or t
  misc_feature (776)..(777): n is a, c, g, or t
  misc_feature (801)..(801): n is a, c, g, or t
  misc_feature (815)..(815): n is a, c, g, or t
  misc_feature (827)..(827): n is a, c, g, or t
  misc_feature (838)..(839): n is a, c, g, or t
  misc_feature (842)..(842): n is a, c, g, or t
  misc_feature (844)..(844): n is a, c, g, or t
  misc_feature (855)..(855): n is a, c, g, or t
  misc_feature (857)..(857): n is a, c, g, or t
gggggncatnnttaaatnattnagctccctttnccaaagctcttgtaatnggtctacttctaaagatttatcaaaatttcctgagccgaatctgagtaacatggtgaattcaactttgtgatgtgaaaatacgtgatttggtgacgtttggttagtgttaatgtgactcctgaataaaatcagtaactgacgaagaggtatccttgtgcatctgtgccgtgagagtgcagggtgggaggtccctgtcaccctcttgcaggatatatgtactgttcatctcttgagaaggggcacaggctaaggatccgacagagctaaagcttgcaccagcccaccacagctatgacgaggagactccgcagaagcaagtgtatactctgctgggcttgcactgccagccacagtaacctgcttcctgaccctgctttcggcctcttggtcctcacaccttgtcatttggaggaagtggagaaggaccactttcangaatcatcgtccactgtctccagtcatcttggttcctgtgaaacaaaattcagtgtcaaaaggcaaacgcacatctctcattccaaaggacaccattttacttggacattgcataagtcnatattaacatctttcctcattagatgtanataatagtactaaantattaatatctaaatttaaanngtctatacttttaaaagatttntgtgttatnacccaaactttttactttttgctgaaanatgtntctaaggtaccagctgtcctcactcctgcttccaaacncnnaatacccaccaaaagtttggcttncacaggcaacaaantttcttgaaacnaccaatttacnnccncnatactccgctncntaa

SEQ ID NO: 242 - DNA, 248 bp, Artificial Sequence
  Description of Artificial Sequence: Note = Synthetic Construct
  misc_feature (12)..(12): n is a, c, g, or t
  misc_feature (19)..(19): n is a, c, g, or t
  misc_feature (42)..(42): n is a, c, g, or t
  misc_feature (53)..(53): n is a, c, g, or t
  misc_feature (58)..(58): n is a, c, g, or t
  misc_feature (64)..(64): n is a, c, g, or t
  misc_feature (67)..(67): n is a, c, g, or t
  misc_feature (69)..(69): n is a, c, g, or t
  misc_feature (76)..(76): n is a, c, g, or t
  misc_feature (85)..(85): n is a, c, g, or t
  misc_feature (97)..(99): n is a, c, g, or t
  misc_feature (102)..(103): n is a, c, g, or t
  misc_feature (106)..(109): n is a, c, g, or t
  misc_feature (111)..(112): n is a, c, g, or t
  misc_feature (123)..(123): n is a, c, g, or t
  misc_feature (138)..(138): n is a, c, g, or t
  misc_feature (143)..(143): n is a, c, g, or t
  misc_feature (145)..(145): n is a, c, g, or t
  misc_feature (153)..(153): n is a, c, g, or t
  misc_feature (163)..(163): n is a, c, g, or t
  misc_feature (165)..(165): n is a, c, g, or t
  misc_feature (169)..(169): n is a, c, g, or t
  misc_feature (178)..(178): n is a, c, g, or t
  misc_feature (180)..(180): n is a, c, g, or t
  misc_feature (208)..(208): n is a, c, g, or t
  misc_feature (212)..(212): n is a, c, g, or t
  misc_feature (217)..(217): n is a, c, g, or t
  misc_feature (219)..(219): n is a, c, g, or t
  misc_feature (221)..(221): n is a, c, g, or t
  misc_feature (225)..(226): n is a, c, g, or t
  misc_feature (230)..(230): n is a, c, g, or t
  misc_feature (232)..(233): n is a, c, g, or t
  misc_feature (235)..(235): n is a, c, g, or t
  misc_feature (240)..(240): n is a, c, g, or t
tggattcctctncctaaanacacaacggggggtgggggattngcccctggtcnatgcngctttncancncagggcntgggtcggnccccccccaaannnacnntcnnnncnngcccctctccnatgtcttgaaaaggnatccntnatctgtcngccgggcccncntccntcccccttntnttcccttccaatcccccctcttcggggngacnccccntntnggannccgngnngnccccntcccccct

SEQ ID NO: 243 - DNA, 1100 bp, Artificial Sequence
  Description of Artificial Sequence: Note = Synthetic Construct
  misc_feature (7)..(7): n is a, c, g, or t
  misc_feature (21)..(21): n is a, c, g, or t
  misc_feature (42)..(42): n is a, c, g, or t
  misc_feature (46)..(46): n is a, c, g, or t
  misc_feature (64)..(66): n is a, c, g, or t
  misc_feature (71)..(71): n is a, c, g, or t
  misc_feature (94)..(95): n is a, c, g, or t
  misc_feature (119)..(119): n is a, c, g, or t
  misc_feature (121)..(121): n is a, c, g, or t
  misc_feature (152)..(153): n is a, c, g, or t
  misc_feature (165)..(165): n is a, c, g, or t
  misc_feature (177)..(177): n is a, c, g, or t
  misc_feature (182)..(182): n is a, c, g, or t
  misc_feature (215)..(215): n is a, c, g, or t
  misc_feature (228)..(228): n is a, c, g, or t
  misc_feature (276)..(276): n is a, c, g, or t
  misc_feature (289)..(289): n is a, c, g, or t
  misc_feature (306)..(306): n is a, c, g, or t
  misc_feature (312)..(312): n is a, c, g, or t
  misc_feature (320)..(320): n is a, c, g, or t
  misc_feature (333)..(333): n is a, c, g, or t
  misc_feature (394)..(394): n is a, c, g, or t
  misc_feature (405)..(405): n is a, c, g, or t
  misc_feature (429)..(429): n is a, c, g, or t
  misc_feature (476)..(476): n is a, c, g, or t
  misc_feature (482)..(482): n is a, c, g, or t
  misc_feature (664)..(664): n is a, c, g, or t
  misc_feature (683)..(683): n is a, c, g, or t
  misc_feature (1082)..(1082): n is a, c, g, or t
cactttnttccctcaagggtnttttttcccctttaagaaggntganccttaaattttgttcccnnntgggnttcattttttttggcatttgggnnaattcagccttttgggtaattgananttttcaagggggtgcatcccattgtgttttnntgggatgggttncctcaatcgggntgatntttcccagttccaaccatttgcctaggaatttnaaaaagtcattgnttttgatagctgagtaatatcccatttgtgtagatgtaccacattttntgtaccattcctntgttgagggcatttggnttcttnccagtttntggttattataantaaggttgttatgaacatagtggagcacgtgtcttttttatatgttggggcatcttttggntatatgcccangagaggtatagctggatgctaacntgattttaatctcttgggcccacttgtagagggggagaactgattcntgtaanttgtctctgacttccacgcacatgtgtggcatgtgtacccatatatgtgttcacacatgcatatgcacacagaaattaataaatgtcatgaattaaaaaaagaggaacagggttggagaattagctcagcaggtgactgaaactgggttctcagtacccatgtgaggcagctcataatggcntgaactccagatccaaggnatctgtctgatgccctcttctggccactgcagtcagtgcactgaattgcgcattttattttctccaatacaatagtcatttaattaaaaaataatcttaaattggtaagagagagacacactgtaacaggtacagaatttgataaatttttctagagtggctcaaagagccagacagacaacatttgtgtactagttcattagggatttaacaaaggaagcagaccaacagtcagatggacaagtcgccccaggccaggcatgggagagtgaaggactttacactcacagagtctttatatatttagctatctgagcctcttattcattttgttttatttgtagagagtctcatgtagtcccagaaggctttgaccttctttgtagttgaggcatggcnttgaataatgtgtaaatg

SEQ ID NO: 244 - DNA, 310 bp, Artificial Sequence
  Description of Artificial Sequence: Note = Synthetic Construct
tttttttttttttttttcgtcagttactgattttattcaggagtcacattaacactaaccaaacgtcaccaaatcacgtattttcacatcacaaagttgaattccactgcaaatccacacgtttgctttgtaagcgtgagtatgttggctactgattcggaaaactcggcacggtaatttggggaccacgtggtttccggtggttggcctttttaaagataaggtcccgatatgtaagctaggctaccctgaaactccctgttaagtcagaccagcctcacgcttacaatctgcgcgcctcagcctcctg

SEQ ID NO: 245 - DNA, 1033 bp, Artificial Sequence
  Description of Artificial Sequence: Note = Synthetic Construct
  misc_feature (14)..(14): n is a, c, g, or t
  misc_feature (25)..(25): n is a, c, g, or t
  misc_feature (38)..(38): n is a, c, g, or t
  misc_feature (41)..(41): n is a, c, g, or t
  misc_feature (51)..(51): n is a, c, g, or t
  misc_feature (56)..(56): n is a, c, g, or t
  misc_feature (68)..(68): n is a, c, g, or t
  misc_feature (72)..(72): n is a, c, g, or t
  misc_feature (76)..(77): n is a, c, g, or t
  misc_feature (82)..(82): n is a, c, g, or t
  misc_feature (89)..(89): n is a, c, g, or t
  misc_feature (92)..(92): n is a, c, g, or t
  misc_feature (97)..(97): n is a, c, g, or t
  misc_feature (100)..(100): n is a, c, g, or t
  misc_feature (105)..(105): n is a, c, g, or t
  misc_feature (115)..(116): n is a, c, g, or t
  misc_feature (118)..(118): n is a, c, g, or t
  misc_feature (124)..(125): n is a, c, g, or t
  misc_feature (131)..(131): n is a, c, g, or t
  misc_feature (134)..(134): n is a, c, g, or t
  misc_feature (138)..(138): n is a, c, g, or t
  misc_feature (142)..(142): n is a, c, g, or t
  misc_feature (151)..(151): n is a, c, g, or t
  misc_feature (155)..(155): n is a, c, g, or t
  misc_feature (159)..(159): n is a, c, g, or t
  misc_feature (177)..(177): n is a, c, g, or t
  misc_feature (189)..(189): n is a, c, g, or t
  misc_feature (192)..(192): n is a, c, g, or t
  misc_feature (199)..(199): n is a, c, g, or t
  misc_feature (205)..(206): n is a, c, g, or t
  misc_feature (208)..(209): n is a, c, g, or t
  misc_feature (224)..(225): n is a, c, g, or t
  misc_feature (228)..(228): n is a, c, g, or t
  misc_feature (240)..(240): n is a, c, g, or t
  misc_feature (244)..(244): n is a, c, g, or t
  misc_feature (247)..(247): n is a, c, g, or t
  misc_feature (262)..(262): n is a, c, g, or t
  misc_feature (278)..(280): n is a, c, g, or t
  misc_feature (282)..(282): n is a, c, g, or t
  misc_feature (286)..(286): n is a, c, g, or t
  misc_feature (288)..(288): n is a, c, g, or t
  misc_feature (297)..(297): n is a, c, g, or t
  misc_feature (304)..(304): n is a, c, g, or t
  misc_feature (306)..(307): n is a, c, g, or t
  misc_feature (310)..(310): n is a, c, g, or t
  misc_feature (320)..(321): n is a, c, g, or t
  misc_feature (325)..(325): n is a, c, g, or t
  misc_feature (327)..(327): n is a, c, g, or t
  misc_feature (332)..(332): n is a, c, g, or t
  misc_feature (334)..(334): n is a, c, g, or t
  misc_feature (339)..(340): n is a, c, g, or t
  misc_feature (349)..(349): n is a, c, g, or t
  misc_feature (351)..(351): n is a, c, g, or t
  misc_feature (358)..(358): n is a, c, g, or t
  misc_feature (360)..(360): n is a, c, g, or t
  misc_feature (364)..(365): n is a, c, g, or t
  misc_feature (368)..(368): n is a, c, g, or t
  misc_feature (373)..(373): n is a, c, g, or t
  misc_feature (375)..(375): n is a, c, g, or t
  misc_feature (377)..(378): n is a, c, g, or t
  misc_feature (380)..(380): n is a, c, g, or t
  misc_feature (384)..(384): n is a, c, g, or t
  misc_feature (388)..(388): n is a, c, g, or t
  misc_feature (390)..(390): n is a, c, g, or t
  misc_feature (393)..(393): n is a, c, g, or t
  misc_feature (397)..(397): n is a, c, g, or t
  misc_feature (400)..(400): n is a, c, g, or t
  misc_feature (406)..(406): n is a, c, g, or t
  misc_feature (416)..(416): n is a, c, g, or t
  misc_feature (420)..(421): n is a, c, g, or t
  misc_feature (429)..(429): n is a, c, g, or t
  misc_feature (443)..(443): n is a, c, g, or t
  misc_feature (446)..(446): n is a, c, g, or t
  misc_feature (456)..(456): n is a, c, g, or t
  misc_feature (460)..(461): n is a, c, g, or t
  misc_feature (466)..(466): n is a, c, g, or t
  misc_feature (474)..(474): n is a, c, g, or t
  misc_feature (476)..(476): n is a, c, g, or t
  misc_feature (491)..(491): n is a, c, g, or t
  misc_feature (500)..(500): n is a, c, g, or t
  misc_feature (503)..(503): n is a, c, g, or t
  misc_feature (506)..(506): n is a, c, g, or t
  misc_feature (515)..(515): n is a, c, g, or t
  misc_feature (529)..(529): n is a, c, g, or t
  misc_feature (556)..(556): n is a, c, g, or t
  misc_feature (587)..(587): n is a, c, g, or t
  misc_feature (598)..(598): n is a, c, g, or t
  misc_feature (604)..(604): n is a, c, g, or t
  misc_feature (606)..(606): n is a, c, g, or t
  misc_feature (610)..(610): n is a, c, g, or t
  misc_feature (614)..(614): n is a, c, g, or t
  misc_feature (620)..(620): n is a, c, g, or t
  misc_feature (622)..(622): n is a, c, g, or t
  misc_feature (626)..(626): n is a, c, g, or t
  misc_feature (632)..(632): n is a, c, g, or t
  misc_feature (644)..(644): n is a, c, g, or t
  misc_feature (646)..(646): n is a, c, g, or t
  misc_feature (648)..(649): n is a, c, g, or t
  misc_feature (654)..(656): n is a, c, g, or t
  misc_feature (666)..(666): n is a, c, g, or t
  misc_feature (669)..(669): n is a, c, g, or t
  misc_feature (676)..(676): n is a, c, g, or t
  misc_feature (679)..(679): n is a, c, g, or t
  misc_feature (687)..(687): n is a, c, g, or t
  misc_feature (690)..(690): n is a, c, g, or t
  misc_feature (701)..(701): n is a, c, g, or t
  misc_feature (712)..(712): n is a, c, g, or t
  misc_feature (717)..(717): n is a, c, g, or t
  misc_feature (727)..(727): n is a, c, g, or t
  misc_feature (739)..(739): n is a, c, g, or t
  misc_feature (746)..(746): n is a, c, g, or t
  misc_feature (748)..(748): n is a, c, g, or t
  misc_feature (753)..(753): n is a, c, g, or t
  misc_feature (769)..(769): n is a, c, g, or t
  misc_feature (777)..(777): n is a, c, g, or t
  misc_feature (783)..(783): n is a, c, g, or t
  misc_feature (786)..(786): n is a, c, g, or t
  misc_feature (824)..(824): n is a, c, g, or t
  misc_feature (828)..(828): n is a, c, g, or t
  misc_feature (850)..(852): n is a, c, g, or t
  misc_feature (868)..(868): n is a, c, g, or t
  misc_feature (900)..(900): n is a, c, g, or t
  misc_feature (905)..(905): n is a, c, g, or t
  misc_feature (923)..(924): n is a, c, g, or t
  misc_feature (931)..(931): n is a, c, g, or t
  misc_feature (937)..(937): n is a, c, g, or t
  misc_feature (940)..(940): n is a, c, g, or t
  misc_feature (955)..(956): n is a, c, g, or t
  misc_feature (960)..(961): n is a, c, g, or t
  misc_feature (969)..(969): n is a, c, g, or t
  misc_feature (974)..(974): n is a, c, g, or t
  misc_feature (979)..(979): n is a, c, g, or t
  misc_feature (991)..(991): n is a, c, g, or t
  misc_feature (1006)..(1006): n is a, c, g, or t
  misc_feature (1013)..(1013): n is a, c, g, or t
  misc_feature (1017)..(1018): n is a, c, g, or t
  misc_feature (1031)..(1031): n is a, c, g, or t
caattcacacattnatcactggccntcacagttatgantancatgtaacangcctntaactcaaaganagancatnnttttngcgaaancgnaacantgnttcantgagaattcnngntccctnntggcantgncttnaatnctgcgtganggantccntcactcttctcacgaccncatcacatttcncantccatcntggtcnncnnggtaaccttggtacnntgntcagcgacatcnaagngangccatcgggctgtcncatggcttcagtttcnnncncttntnattcctcanaacacgngnnccnatgtggggannaccntncaatncntattnnggcatcagncnacattcngncaanntcnaccantncnngnacgnactncntcncctnggntgtgangaacacatgncaannggtttgancttggcagcatgcntgntgatgcacangatnnccacnttcacgantnacacggctttcctgntacactcancantanctgtcctgngattgaatcaaagngaagtcaagaatggatcatcaacactntggatcacacaaggcattccatctttgacangtcgacatgtntccagngnaatncatncataangnatcntcaatnatctgacaaatntntnnatcgnnnattaagtgcnctncaaaccnggnaagtgacnganacattgcaagnactcaaactgnggctntctcaagaancctacggtaggnccggaangnccccnccagcaaggatggacnttccgggntcaaanttnagcaggccttagaatccacggggatcccgaaaaaacgnaggnggtaaggaagaagggccttagnnnaaattaccaaaaggcntgctttaagacaattgaagccaaccagggggnaaggnggacgccctaaatttatnnccaatanggttcntcnccgctccattaaggnncccnntttccaanaccgncccanaaaatttctgcnatccggtttgcgganccccctnggtnnaaccttccaacgncg

SEQ ID NO: 246 - DNA, 843 bp, Artificial Sequence
  Description of Artificial Sequence: Note = Synthetic Construct
  misc_feature (16)..(16): n is a, c, g, or t
  misc_feature (244)..(244): n is a, c, g, or t
  misc_feature (465)..(465): n is a, c, g, or t
  misc_feature (470)..(470): n is a, c, g, or t
  misc_feature (472)..(473): n is a, c, g, or t
  misc_feature (477)..(477): n is a, c, g, or t
  misc_feature (479)..(479): n is a, c, g, or t
  misc_feature (481)..(482): n is a, c, g, or t
  misc_feature (487)..(487): n is a, c, g, or t
  misc_feature (491)..(491): n is a, c, g, or t
  misc_feature (493)..(496): n is a, c, g, or t
  misc_feature (500)..(500): n is a, c, g, or t
  misc_feature (507)..(508): n is a, c, g, or t
  misc_feature (516)..(516): n is a, c, g, or t
  misc_feature (518)..(518): n is a, c, g, or t
  misc_feature (520)..(520): n is a, c, g, or t
  misc_feature (539)..(540): n is a, c, g, or t
  misc_feature (544)..(545): n is a, c, g, or t
  misc_feature (548)..(550): n is a, c, g, or t
  misc_feature (554)..(555): n is a, c, g, or t
  misc_feature (564)..(564): n is a, c, g, or t
  misc_feature (571)..(572): n is a, c, g, or t
  misc_feature (580)..(581): n is a, c, g, or t
  misc_feature (586)..(586): n is a, c, g, or t
  misc_feature (589)..(591): n is a, c, g, or t
  misc_feature (594)..(594): n is a, c, g, or t
  misc_feature (597)..(597): n is a, c, g, or t
  misc_feature (603)..(603): n is a, c, g, or t
  misc_feature (611)..(611): n is a, c, g, or t
  misc_feature (613)..(613): n is a, c, g, or t
  misc_feature (617)..(618): n is a, c, g, or t
  misc_feature (621)..(621): n is a, c, g, or t
  misc_feature (623)..(623): n is a, c, g, or t
  misc_feature (627)..(630): n is a, c, g, or t
  misc_feature (632)..(632): n is a, c, g, or t
  misc_feature (636)..(637): n is a, c, g, or t
  misc_feature (640)..(640): n is a, c, g, or t
  misc_feature (648)..(648): n is a, c, g, or t
  misc_feature (651)..(651): n is a, c, g, or t
  misc_feature (655)..(661): n is a, c, g, or t
  misc_feature (666)..(666): n is a, c, g, or t
  misc_feature (670)..(670): n is a, c, g, or t
  misc_feature (673)..(673): n is a, c, g, or t
  misc_feature (676)..(676): n is a, c, g, or t
  misc_feature (681)..(681): n is a, c, g, or t
  misc_feature (683)..(683): n is a, c, g, or t
  misc_feature (688)..(688): n is a, c, g, or t
  misc_feature (695)..(695): n is a, c, g, or t
  misc_feature (697)..(697): n is a, c, g, or t
  misc_feature (699)..(699): n is a, c, g, or t
  misc_feature (701)..(701): n is a, c, g, or t
  misc_feature (705)..(707): n is a, c, g, or t
  misc_feature (710)..(712): n is a, c, g, or t
  misc_feature (714)..(715): n is a, c, g, or t
  misc_feature (717)..(717): n is a, c, g, or t
  misc_feature (729)..(730): n is a, c, g, or t
  misc_feature (733)..(733): n is a, c, g, or t
  misc_feature (737)..(737): n is a, c, g, or t
  misc_feature (740)..(740): n is a, c, g, or t
  misc_feature (742)..(742): n is a, c, g, or t
  misc_feature (744)..(745): n is a, c, g, or t
  misc_feature (748)..(748): n is a, c, g, or t
  misc_feature (750)..(750): n is a, c, g, or t
  misc_feature (752)..(752): n is a, c, g, or t
  misc_feature (758)..(758): n is a, c, g, or t
  misc_feature (764)..(764): n is a, c, g, or t
  misc_feature (773)..(773): n is a, c, g, or t
  misc_feature (776)..(776): n is a, c, g, or t
  misc_feature (778)..(778): n is a, c, g, or t
  misc_feature (780)..(781): n is a, c, g, or t
  misc_feature (786)..(787): n is a, c, g, or t
  misc_feature (789)..(789): n is a, c, g, or t
  misc_feature (791)..(791): n is a, c, g, or t
  misc_feature (794)..(796): n is a, c, g, or t
  misc_feature (799)..(802): n is a, c, g, or t
  misc_feature (805)..(805): n is a, c, g, or t
  misc_feature (808)..(809): n is a, c, g, or t
  misc_feature (811)..(811): n is a, c, g, or t
  misc_feature (817)..(819): n is a, c, g, or t
  misc_feature (823)..(823): n is a, c, g, or t
  misc_feature (828)..(828): n is a, c, g, or t
  misc_feature (834)..(834): n is a, c, g, or t
  misc_feature (837)..(837): n is a, c, g, or t
  misc_feature (839)..(840): n is a, c, g, or t
  misc_feature (843)..(843): n is a, c, g, or t
gagtccaccgcggtgngcacgctctagccgggcgaatcccccgggctgcaggaattcgatatcaagctttgacccttagtcacagtccagccagtttcccccagtctctgtctcacacgttacctccttcagcttgtcagagagaaccttgatctcctcttcatacttgtcttctttctgagagtactaaaagtgctcatcattggaaaacgttcttcggggcgaaaactctcaaggatcttancgctgttgagatccagttcgatgtaacccactcgtgcacccaactgaccttcagcatcttttactttcaccagcgtttctgggtgagcaaaaacaggaaggcaaaatgccgcaaaaaagggaataagggcgacacggaaatgttgaatactcatactcttcctttttcaatattattgaagcatttatcagggttattgggactagtccgcgttgctggcnttttncnnctangntnntttcnccgngnnnngggnttggatnnctgctcgntnantctgagactttaaacgttnntggnnctnnncggnntgccggggngacgcgnngagggtcnngtgancgnnnaancgnaaaaancgccaatngnaaanngcntncccnnnncngttnncgntttataanggnctgnnnnnnnggttnccanctnaanccggnantaccnaaccaanangnangttnnnacnnnanngncccagggttaannttnggtnggncnannatngntnattggncggganaattcccanggnancnntaccnngntncannnggnnnntcnatnnangggaannntaancttcntggccngtncnnttn

SEQ ID NO: 247 - DNA, 1086 bp, Artificial Sequence
  Description of Artificial Sequence: Note = Synthetic Construct
  misc_feature (5)..(5): n is a, c, g, or t
  misc_feature (51)..(51): n is a, c, g, or t
  misc_feature (69)..(69): n is a, c, g, or t
  misc_feature (445)..(445): n is a, c, g, or t
  misc_feature (498)..(498): n is a, c, g, or t
  misc_feature (529)..(529): n is a, c, g, or t
  misc_feature (539)..(539): n is a, c, g, or t
  misc_feature (565)..(565): n is a, c, g, or t
  misc_feature (569)..(569): n is a, c, g, or t
  misc_feature (601)..(601): n is a, c, g, or t
  misc_feature (603)..(603): n is a, c, g, or t
  misc_feature (625)..(625): n is a, c, g, or t
  misc_feature (677)..(677): n is a, c, g, or t
  misc_feature (686)..(686): n is a, c, g, or t
  misc_feature (722)..(722): n is a, c, g, or t
  misc_feature (728)..(728): n is a, c, g, or t
  misc_feature (757)..(757): n is a, c, g, or t
  misc_feature (765)..(765): n is a, c, g, or t
  misc_feature (785)..(785): n is a, c, g, or t
  misc_feature (800)..(800): n is a, c, g, or t
  misc_feature (841)..(841): n is a, c, g, or t
  misc_feature (844)..(844): n is a, c, g, or t
  misc_feature (861)..(861): n is a, c, g, or t
  misc_feature (881)..(881): n is a, c, g, or t
  misc_feature (896)..(896): n is a, c, g, or t
  misc_feature (903)..(903): n is a, c, g, or t
  misc_feature (917)..(917): n is a, c, g, or t
  misc_feature (951)..(951): n is a, c, g, or t
  misc_feature (966)..(966): n is a, c, g, or t
  misc_feature (973)..(973): n is a, c, g, or t
  misc_feature (990)..(990): n is a, c, g, or t
  misc_feature (995)..(995): n is a, c, g, or t
  misc_feature (1004)..(1004): n is a, c, g, or t
  misc_feature (1006)..(1006): n is a, c, g, or t
  misc_feature (1010)..(1010): n is a, c, g, or t
  misc_feature (1014)..(1014): n is a, c, g, or t
  misc_feature (1020)..(1020): n is a, c, g, or t
  misc_feature (1038)..(1038): n is a, c, g, or t
  misc_feature (1048)..(1048): n is a, c, g, or t
  misc_feature (1058)..(1058): n is a, c, g, or t
  misc_feature (1067)..(1067): n is a, c, g, or t
  misc_feature (1073)..(1073): n is a, c, g, or t
  misc_feature (1077)..(1077): n is a, c, g, or t
  misc_feature (1082)..(1082): n is a, c, g, or t
cattnacacttattctaggcctctgcaccaacctaaatatttattttacantgaaagttcgaatcccantgtccccctgggagacaaggttcctggagtatgtccatgggcagtggcaaagcagctgccactcttcctaggtctctctgtggcctctctctccaaggcacatgaaatttaccacagcatatgcatttccttttctttttgagacagggtttctctgtgtagacttagctgtcctggaactcattctggagtttcttatcaggccagcctccaactcgtggagatccacttgtctctgcttcctgagtgccaccacccctggcctggcatatacacagtcaattccagaaaccgctttgctatcttggaactaatgaaggtagaggagaggacctctggttcatctggtgctgataactgagggacagaaccccangggaggagcccagtctggggaccaacatcatgttacagagaagcagtttccancatcacaaagtatcaacatcctgcttctaanggagacctanaactgactgcattggagggaaagcangatntgaatatttgcattttcctgttttgccctaangntctgtccttaacttcctagtanaaccaaggtgcaaggaccaaactgggaggacaactgctgccacaacaagtcntggggacanggaacatgctggcttctcagctccagtatactgatnctacanagaattatgatgtctggatcctttccaancttggccntacaatgcaagcaggttacntctaggacttggacngtgctcaaggacacattggcaagaactcaagctgtttttantangtaatgggatgaattanaaataatggttccttggatnggaaaattccaagancaaaggntaaaaaaccttccnacggaattcacttggaacaacaccaggtcattgncccatttgggtcagnccttggnaagggttggttttaccnacctntgacaaacncncccntggnccttcnaaaattagggaacccatnttaaattttnaaaaccctgnaaaaaaacncccagnaatnttttngggg

SEQ ID NO: 248 - DNA, 812 bp, Artificial Sequence
  Description of Artificial Sequence: Note = Synthetic Construct
  misc_feature (4)..(4): n is a, c, g, or t
  misc_feature (14)..(14): n is a, c, g, or t
  misc_feature (494)..(494): n is a, c, g, or t
  misc_feature (534)..(534): n is a, c, g, or t
  misc_feature (572)..(572): n is a, c, g, or t
  misc_feature (602)..(602): n is a, c, g, or t
  misc_feature (627)..(627): n is a, c, g, or t
  misc_feature (635)..(635): n is a, c, g, or t
  misc_feature (641)..(641): n is a, c, g, or t
  misc_feature (649)..(649): n is a, c, g, or t
  misc_feature (651)..(651): n is a, c, g, or t
  misc_feature (662)..(662): n is a, c, g, or t
  misc_feature (671)..(671): n is a, c, g, or t
  misc_feature (690)..(690): n is a, c, g, or t
  misc_feature (696)..(696): n is a, c, g, or t
  misc_feature (708)..(708): n is a, c, g, or t
  misc_feature (720)..(720): n is a, c, g, or t
  misc_feature (730)..(731): n is a, c, g, or t
  misc_feature (733)..(733): n is a, c, g, or t
  misc_feature (736)..(736): n is a, c, g, or t
  misc_feature (747)..(747): n is a, c, g, or t
  misc_feature (749)..(749): n is a, c, g, or t
  misc_feature (764)..(764): n is a, c, g, or t
  misc_feature (768)..(768): n is a, c, g, or t
  misc_feature (788)..(788): n is a, c, g, or t
  misc_feature (795)..(795): n is a, c, g, or t
  misc_feature (799)..(799): n is a, c, g, or t
  misc_feature (806)..(807): n is a, c, g, or t
cccncattcacacnttaattcagggccgcaccattatttgaaaatttaaagtctttccataatgaacatagctaaaaacataaaagacaaatgatagagaaattaaaagcaattatcaaaggaattcagacttcatggcgaaccagaacttcatgatcttcccaagcaaatccgggcaactcagggagactggcctgtgagatggttcagtgcctaaaagatgattgctacctgaggactccagttcaagtcctgggacacacctggtaagttgtcccctgcacaaggtgcatgcccccatttcccaaaataagagtgtaaattgtctgaagaaagaagaaaaaagacgtgtggttaaagggcatagtcaacaactaagttaatagctagcatctctcatgtagaattttgattccagagattttgttctagatcaggtattagtcctggtctggggctgaactggtagcatgcagaagccctgggtccctcangacttaaggtcagttttgggttgtacatactgagatctangccatcctaaagatgcatgaaactctattttaaaatanaagcctggtgtgacagcccatgtttgcaanactgttgtaaattcaaggttaatcngggctacnacatantaatttcnanacgagattcanacacataanactgtctccaaataaatantataantcaggtgtggcnaatgcctatatncacagtgctnnanaanacagggagatnanagttgctttgtgaantcancctttgctttgtgattccangctaccngggncaaatgnnacctg

SEQ ID NO: 249 - DNA, 939 bp, Artificial Sequence
  Description of Artificial Sequence: Note = Synthetic Construct
  misc_feature (1)..(1): n is a, c, g, or t
  misc_feature (6)..(6): n is a, c, g, or t
  misc_feature (14)..(14): n is a, c, g, or t
  misc_feature (16)..(16): n is a, c, g, or t
  misc_feature (26)..(26): n is a, c, g, or t
  misc_feature (38)..(38): n is a, c, g, or t
  misc_feature (42)..(42): n is a, c, g, or t
  misc_feature (70)..(70): n is a, c, g, or t
  misc_feature (73)..(74): n is a, c, g, or t
  misc_feature (76)..(76): n is a, c, g, or t
  misc_feature (79)..(79): n is a, c, g, or t
  misc_feature (82)..(82): n is a, c, g, or t
  misc_feature (84)..(84): n is a, c, g, or t
  misc_feature (86)..(88): n is a, c, g, or t
  misc_feature (94)..(94): n is a, c, g, or t
  misc_feature (103)..(104): n is a, c, g, or t
  misc_feature (122)..(122): n is a, c, g, or t
  misc_feature (125)..(128): n is a, c, g, or t
  misc_feature (152)..(152): n is a, c, g, or t
  misc_feature (166)..(166): n is a, c, g, or t
  misc_feature (172)..(172): n is a, c, g, or t
  misc_feature (174)..(174): n is a, c, g, or t
  misc_feature (181)..(181): n is a, c, g, or t
  misc_feature (184)..(184): n is a, c, g, or t
  misc_feature (186)..(186): n is a, c, g, or t
  misc_feature (191)..(191): n is a, c, g, or t
  misc_feature (196)..(196): n is a, c, g, or t
  misc_feature (198)..(198): n is a, c, g, or t
  misc_feature (208)..(208): n is a, c, g, or t
  misc_feature (214)..(214): n is a, c, g, or t
  misc_feature (227)..(227): n is a, c, g, or t
  misc_feature (242)..(242): n is a, c, g, or t
  misc_feature (245)..(245): n is a, c, g, or t
  misc_feature (250)..(250): n is a, c, g, or t
  misc_feature (266)..(266): n is a, c, g, or t
  misc_feature (366)..(366): n is a, c, g, or t
  misc_feature (398)..(398): n is a, c, g, or t
  misc_feature (433)..(433): n is a, c, g, or t
  misc_feature (606)..(606): n is a, c, g, or t
  misc_feature (701)..(701): n is a, c, g, or t
  misc_feature (705)..(705): n is a, c, g, or t
  misc_feature (730)..(730): n is a, c, g, or t
  misc_feature (803)..(803): n is a, c, g, or t
  misc_feature (809)..(809): n is a, c, g, or t
  misc_feature (818)..(818): n is a, c, g, or t
  misc_feature (900)..(900): n is a, c, g, or t
  misc_feature (920)..(920): n is a, c, g, or t
  misc_feature (933)..(933): n is a, c, g, or t
nttttnatagaggnanggaccccccntccagagatttntganggaagggggggctttttggaaatttatnggnntnttnttncngnnngagganatttcttannttttataaatgaatgccnccnnnngggtggaaaagcgtttttaagggngtagattagggttntttggnanttagaanggntnggagncttcngnggggtgtttntttgantcccgcctaatgngattttttggtgggnaantttcndgggcaagacacattnacacatattattggggagtaaataaatatgtatttcatccatgttccatggttggaaatgagattgtatggggatgaaatatgttgttgtgagccatttntgtccaattaagatgttttaattccccccccntgtgggcagtgacagtttttgatggcttttgatantaatgtgttcaagattctgttgtatcagaaggttatttagagaaaagccacaggtagttcaggttagctggggagtacatccgaggtccatcttgaaacagtgttcataataaataattcaggttaactgtcagcagtgaatgggtaactttcaacccaggcgtaactgaggnttctggggctgcttacattttgaagttagaaggttgaacggagtgaggaaggggtttgtgagccccaacccctgacaggagctgtggacagctgntggnttcagcgggagagaaattgattttnttcaaagatgtggttcctgcagcacaaaaagacccacagagactgagccaacaagcaaagagcatgcgtggantacacntaggccccntacacattggtagcagatgtgcagcttggcctttatgtgggtcccataacaattggagtgggtattctctggtacagatctnttgcccacttttggatccgntatgataaacttnaatgac

SEQ ID NO: 250 - DNA, 232 bp, Artificial Sequence
  Description of Artificial Sequence: Note = Synthetic Construct
  misc_feature (20)..(20): n is a, c, g, or t
  misc_feature (39)..(39): n is a, c, g, or t
caattcacactttattctcngcccacttcatgggaatanaaaagaccgggagcttccaccaagaaggtactgcccactgggagaaaaccgacttctttttgttgttgttctgatgttttgtttttgagataaaggtctcactgtgtagctcaggctggttttgaaatcaggatcctgaccctcaggaatgttaaagtgcctaaaagtggagacaaattattttacctgcctt

SEQ ID NO: 251 - DNA, 122 bp, Artificial Sequence
  Description of Artificial Sequence: Note = Synthetic Construct
  misc_feature (3)..(4): n is a, c, g, or t
  misc_feature (8)..(8): n is a, c, g, or t
  misc_feature (10)..(10): n is a, c, g, or t
  misc_feature (13)..(13): n is a, c, g, or t
  misc_feature (17)..(18): n is a, c, g, or t
  misc_feature (20)..(20): n is a, c, g, or t
  misc_feature (22)..(23): n is a, c, g, or t
  misc_feature (26)..(28): n is a, c, g, or t
  misc_feature (32)..(32): n is a, c, g, or t
  misc_feature (40)..(40): n is a, c, g, or t
  misc_feature (45)..(45): n is a, c, g, or t
  misc_feature (50)..(50): n is a, c, g, or t
  misc_feature (52)..(52): n is a, c, g, or t
  misc_feature (54)..(56): n is a, c, g, or t
  misc_feature (60)..(60): n is a, c, g, or t
  misc_feature (63)..(64): n is a, c, g, or t
  misc_feature (67)..(67): n is a, c, g, or t
  misc_feature (70)..(70): n is a, c, g, or t
  misc_feature (75)..(76): n is a, c, g, or t
  misc_feature (80)..(80): n is a, c, g, or t
  misc_feature (83)..(83): n is a, c, g, or t
  misc_feature (86)..(86): n is a, c, g, or t
  misc_feature (91)..(91): n is a, c, g, or t
  misc_feature (94)..(94): n is a, c, g, or t
  misc_feature (96)..(96): n is a, c, g, or t
  misc_feature (98)..(99): n is a, c, g, or t
  misc_feature (107)..(107): n is a, c, g, or t
  misc_feature (110)..(110): n is a, c, g, or t
  misc_feature (113)..(113): n is a, c, g, or t
  misc_feature (115)..(115): n is a, c, g, or t
  misc_feature (117)..(117): n is a, c, g, or t
  misc_feature (121)..(121): n is a, c, g, or t
canncaananaancaanncnanncannnacanaaaccacnccaangggcngncnnnaagnaanncanccnagagnncaancgnagnggcgngcncncnngccgggcnganacnanancagna

SEQ ID NO: 252 - DNA, 619 bp, Artificial Sequence
  Description of Artificial Sequence: Note = Synthetic Construct
  misc_feature (9)..(9): n is a, c, g, or t
  misc_feature (33)..(33): n is a, c, g, or t
  misc_feature (419)..(419): n is a, c, g, or t
  misc_feature (430)..(431): n is a, c, g, or t
  misc_feature (433)..(433): n is a, c, g, or t
  misc_feature (451)..(451): n is a, c, g, or t
  misc_feature (454)..(454): n is a, c, g, or t
  misc_feature (459)..(459): n is a, c, g, or t
  misc_feature (461)..(462): n is a, c, g, or t
  misc_feature (464)..(464): n is a, c, g, or t
  misc_feature (501)..(501): n is a, c, g, or t
  misc_feature (508)..(508): n is a, c, g, or t
  misc_feature (517)..(517): n is a, c, g, or t
  misc_feature (520)..(520): n is a, c, g, or t
  misc_feature (531)..(531): n is a, c, g, or t
  misc_feature (534)..(534): n is a, c, g, or t
  misc_feature (547)..(547): n is a, c, g, or t
  misc_feature (549)..(549): n is a, c, g, or t
  misc_feature (551)..(551): n is a, c, g, or t
  misc_feature (560)..(560): n is a, c, g, or t
  misc_feature (565)..(565): n is a, c, g, or t
  misc_feature (574)..(574): n is a, c, g, or t
  misc_feature (577)..(577): n is a, c, g, or t
  misc_feature (581)..(581): n is a, c, g, or t
  misc_feature (584)..(585): n is a, c, g, or t
  misc_feature (592)..(592): n is a, c, g, or t
  misc_feature (596)..(596): n is a, c, g, or t
  misc_feature (598)..(598): n is a, c, g, or t
  misc_feature (601)..(601): n is a, c, g, or t
  misc_feature (604)..(604): n is a, c, g, or t
  misc_feature (618)..(618): n is a, c, g, or t
cacactttnattcgggcccttgcaggggaggcnaaatcccatcaacagttttgttttagaacctttctgtagtttcaagagacttcaatatacacaacattcaattcttttacaatcttcctggctatctctactgctcgcttttgctgtactttccagaattatcttttaccagaacacttttcctgtcttgttactttcaggttcaaagtctcaaacactgcattttactgataattaaaactttgatacaaggtttctatacaaaaccctcaatgtcctggaacaagaactacgccttttgagtgttagtatttaaggcatttaccaagctttgctcactgcaaatatatatatatatatatatatatatatatatatatatatatatatatatatatatatatatatttatatcncagacacagtnncncgctgtgtctgtgctccncanctcgngnncncataaaattttttttttttttttttttttgtgtctgngccctcngagtggggnganaacacacaccncangttaataaaacanancncctcacagnggggnatatctctnganacantcnnagggccncaancncanttnaagagcgcgccccnt

SEQ ID NO: 253 - DNA, 900 bp, Artificial Sequence
  Description of Artificial Sequence: Note = Synthetic Construct
  misc_feature (13)..(13): n is a, c, g, or t
  misc_feature (16)..(16): n is a, c, g, or t
  misc_feature (18)..(18): n is a, c, g, or t
  misc_feature (20)..(20): n is a, c, g, or t
  misc_feature (22)..(23): n is a, c, g, or t
  misc_feature (38)..(38): n is a, c, g, or t
  misc_feature (47)..(47): n is a, c, g, or t
  misc_feature (60)..(60): n is a, c, g, or t
  misc_feature (67)..(67): n is a, c, g, or t
  misc_feature (69)..(69): n is a, c, g, or t
  misc_feature (71)..(71): n is a, c, g, or t
  misc_feature (79)..(79): n is a, c, g, or t
  misc_feature (91)..(91): n is a, c, g, or t
  misc_feature (93)..(93): n is a, c, g, or t
  misc_feature (97)..(97): n is a, c, g, or t
  misc_feature (104)..(104): n is a, c, g, or t
  misc_feature (108)..(108): n is a, c, g, or t
  misc_feature (130)..(130): n is a, c, g, or t
  misc_feature (138)..(138): n is a, c, g, or t
  misc_feature (142)..(142): n is a, c, g, or t
  misc_feature (163)..(163): n is a, c, g, or t
  misc_feature (186)..(186): n is a, c, g, or t
  misc_feature (204)..(204): n is a, c, g, or t
  misc_feature (208)..(208): n is a, c, g, or t
  misc_feature (212)..(212): n is a, c, g, or t
  misc_feature (216)..(216): n is a, c, g, or t
  misc_feature (220)..(220): n is a, c, g, or t
  misc_feature (226)..(226): n is a, c, g, or t
  misc_feature (233)..(233): n is a, c, g, or t
  misc_feature (235)..(235): n is a, c, g, or t
  misc_feature (244)..(244): n is a, c, g, or t
  misc_feature (252)..(252): n is a, c, g, or t
  misc_feature (258)..(258): n is a, c, g, or t
  misc_feature (260)..(260): n is a, c, g, or t
  misc_feature (265)..(265): n is a, c, g, or t
  misc_feature (269)..(269): n is a, c, g, or t
  misc_feature (273)..(273): n is a, c, g, or t
  misc_feature (287)..(288): n is a, c, g, or t
  misc_feature (298)..(298): n is a, c, g, or t
  misc_feature (301)..(301): n is a, c, g, or t
  misc_feature (312)..(313): n is a, c, g, or t
  misc_feature (320)..(320): n is a, c, g, or t
  misc_feature (327)..(327): n is a, c, g, or t
  misc_feature (353)..(353): n is a, c, g, or t
  misc_feature (362)..(362): n is a, c, g, or t
  misc_feature (369)..(369): n is a, c, g, or t
  misc_feature (371)..(371): n is a, c, g, or t
  misc_feature (375)..(375): n is a, c, g, or t
  misc_feature (377)..(377): n is a, c, g, or t
  misc_feature (380)..(380): n is a, c, g, or t
  misc_feature (386)..(388): n is a, c, g, or t
  misc_feature (402)..(403): n is a, c, g, or t
  misc_feature (410)..(411): n is a, c, g, or t
  misc_feature (414)..(414): n is a, c, g, or t
  misc_feature (432)..(432): n is a, c, g, or t
  misc_feature (434)..(434): n is a, c, g, or t
  misc_feature (467)..(467): n is a, c, g, or t
  misc_feature (485)..(485): n is a, c, g, or t
  misc_feature (493)..(493): n is a, c, g, or t
  misc_feature (513)..(513): n is a, c, g, or t
  misc_feature (518)..(518): n is a, c, g, or t
  misc_feature (523)..(523): n is a, c, g, or t
  misc_feature (527)..(528): n is a, c, g, or t
  misc_feature (531)..(531): n is a, c, g, or t
  misc_feature (534)..(534): n is a, c, g, or t
  misc_feature (539)..(540): n is a, c, g, or t
  misc_feature (544)..(545): n is a, c, g, or t
  misc_feature (549)..(549): n is a, c, g, or t
  misc_feature (556)..(556): n is a, c, g, or t
  misc_feature (558)..(558): n is a, c, g, or t
  misc_feature (568)..(568): n is a, c, g, or t
  misc_feature (573)..(573): n is a, c, g, or t
  misc_feature (575)..(575): n is a, c, g, or t
  misc_feature (584)..(586): n is a, c, g, or t
  misc_feature (606)..(606): n is a, c, g, or t
  misc_feature (610)..(610): n is a, c, g, or t
  misc_feature (619)..(619): n is a, c, g, or t
  misc_feature (622)..(622): n is a, c, g, or t
  misc_feature (634)..(634): n is a, c, g, or t
  misc_feature (636)..(636): n is a, c, g, or t
  misc_feature (643)..(643): n is a, c, g, or t
  misc_feature (646)..(646): n is a, c, g, or t
  misc_feature (653)..(653): n is a, c, g, or t
  misc_feature (656)..(656): n is a, c, g, or t
  misc_feature (665)..(665): n is a, c, g, or t
  misc_feature (667)..(667): n is a, c, g, or t
  misc_feature (669)..(670): n is a, c, g, or t
  misc_feature (686)..(686): n is a, c, g, or t
  misc_feature (695)..(695): n is a, c, g, or t
  misc_feature (702)..(703): n is a, c, g, or t
  misc_feature (706)..(706): n is a, c, g, or t
  misc_feature (719)..(719): n is a, c, g, or t
  misc_feature (725)..(725): n is a, c, g, or t
  misc_feature (727)..(728): n is a, c, g, or t
  misc_feature (731)..(731): n is a, c, g, or t
  misc_feature (735)..(735): n is a, c, g, or t
  misc_feature (737)..(737): n is a, c, g, or t
  misc_feature (743)..(743): n is a, c, g, or t
  misc_feature (747)..(747): n is a, c, g, or t
  misc_feature (749)..(749): n is a, c, g, or t
  misc_feature (756)..(756): n is a, c, g, or t
  misc_feature (758)..(758): n is a, c, g, or t
  misc_feature (762)..(762): n is a, c, g, or t
  misc_feature (765)..(766): n is a, c, g, or t
  misc_feature (769)..(769): n is a, c, g, or t
  misc_feature (778)..(778): n is a, c, g, or t
  misc_feature (784)..(784): n is a, c, g, or t
  misc_feature (789)..(789): n is a, c, g, or t
  misc_feature (793)..(794): n is a, c, g, or t
  misc_feature (798)..(798): n is a, c, g, or t
  misc_feature (812)..(813): n is a, c, g, or t
  misc_feature (816)..(817): n is a, c, g, or t
  misc_feature (823)..(823): n is a, c, g, or t
  misc_feature (826)..(826): n is a, c, g, or t
  misc_feature (828)..(828): n is a, c, g, or t
  misc_feature (836)..(837): n is a, c, g, or t
  misc_feature (844)..(847): n is a, c, g, or t
  misc_feature (851)..(851): n is a, c, g, or t
  misc_feature (854)..(854): n is a, c, g, or t
  misc_feature (856)..(856): n is a, c, g, or t
  misc_feature (866)..(866): n is a, c, g, or t
  misc_feature (870)..(870): n is a, c, g, or t
  misc_feature (877)..(878): n is a, c, g, or t
  misc_feature (885)..(886): n is a, c, g, or t
  misc_feature (889)..(891): n is a, c, g, or t
  misc_feature (895)..(895): n is a, c, g, or t
  misc_feature (898)..(898): n is a, c, g, or t
caggcaatatccncanangncnncttaggaagaccgtnataagggcnccatacaagaaanaacaacntntnaacgaacngaaacacggtcncntagngaatgcntcgnctttcgcccaaaggaaaaagangggatagngacnaggacaacctgcagaggtgcncacctattgttctctctctctcncgctctctctcgctctcncacnctcnctcnctcncactcnctctccnanaaacacccnacctggangtttgncncgatngggnacgnggcttgaggttcanngaccacaacngantgcacgcaagnncgccagncggcttnggtggatatttttttttttttttttnttgtgaccnacaaccngncacnanganccgggnnnttctggtgggcganncgggggnnggntctcgattaccacaacanangctcggtgtcccgaattaccagcccgaccacgnacccggggattcctgggnggccccancggccacggtggcacttgantaacntcccngttnngcnggncgganngggnnttangaacacnangcgcgggttngcccncngttcaaccnnntggcccctatggctaggggngctncctgggganacnaaccccggggcngncccttcnaanccggacnccncgttaacgntncnnccggtttccacccccnaacgacacnccccccnncgnaactggtcttccntgcccncnngcnggcnanaaagancggncntaaatcncnctancanncgnctgagcccnaggccngaaanagtnnctgngcccgacatcaaannccnnaggagnaancngctatctnncccggcnnnnggcnggncncccttcccgnactncgctcgnntaccaanntgnnnttgnttncc

SEQ ID NO: 254 - DNA, 735 bp, Artificial Sequence
  Description of Artificial Sequence: Note = Synthetic Construct
  misc_feature (11)..(11): n is a, c, g, or t
  misc_feature (24)..(24): n is a, c, g, or t
  misc_feature (36)..(37): n is a, c, g, or t
  misc_feature (60)..(60): n is a, c, g, or t
  misc_feature (64)..(64): n is a, c, g, or t
  misc_feature (70)..(71): n is a, c, g, or t
  misc_feature (74)..(74): n is a, c, g, or t
  misc_feature (87)..(87): n is a, c, g, or t
  misc_feature (392)..(392): n is a, c, g, or t
  misc_feature (401)..(401): n is a, c, g, or t
  misc_feature (470)..(470): n is a, c, g, or t
  misc_feature (472)..(472): n is a, c, g, or t
  misc_feature (484)..(484): n is a, c, g, or t
  misc_feature (535)..(535): n is a, c, g, or t
  misc_feature (538)..(538): n is a, c, g, or t
  misc_feature (564)..(564): n is a, c, g, or t
  misc_feature (574)..(574): n is a, c, g, or t
  misc_feature (581)..(581): n is a, c, g, or t
  misc_feature (589)..(589): n is a, c, g, or t
  misc_feature (597)..(597): n is a, c, g, or t
  misc_feature (603)..(603): n is a, c, g, or t
  misc_feature (612)..(612): n is a, c, g, or t
  misc_feature (625)..(625): n is a, c, g, or t
  misc_feature (640)..(640): n is a, c, g, or t
  misc_feature (644)..(644): n is a, c, g, or t
  misc_feature (647)..(647): n is a, c, g, or t
  misc_feature (650)..(650): n is a, c, g, or t
  misc_feature (655)..(655): n is a, c, g, or t
  misc_feature (661)..(661): n is a, c, g, or t
  misc_feature (663)..(664): n is a, c, g, or t
  misc_feature (679)..(679): n is a, c, g, or t
  misc_feature (684)..(684): n is a, c, g, or t
  misc_feature (686)..(686): n is a, c, g, or t
  misc_feature (693)..(693): n is a, c, g, or t
  misc_feature (697)..(697): n is a, c, g, or t
  misc_feature (701)..(701): n is a, c, g, or t
  misc_feature (704)..(704): n is a, c, g, or t
  misc_feature (706)..(706): n is a, c, g, or t
  misc_feature (711)..(711): n is a, c, g, or t
  misc_feature (713)..(715): n is a, c, g, or t
  misc_feature (721)..(721): n is a, c, g, or t
  misc_feature (724)..(724): n is a, c, g, or t
  misc_feature (726)..(726): n is a, c, g, or t
  misc_feature (730)..(730): n is a, c, g, or t
caattcacacnttattcctggccnaacatacgctgnnaaactttcttgtgcttctgattnaacntctgtnngcnaagccacttgaanatttagatggaatgttttcatgaatttgattttttttttccctttgtttcagatttagtggagtttaatttgggtagtcccaagaacgttggtcccttccttgcagtggatcagaaacacgacatcttgctcaaataccgctgtcatggtccacccatccgcttcacgagcgtcttcagtaatgacctccattatgtggcgaatgaactgaacaggatcgtgggagggaagaacacagtggtggccatagcagtatggtctcactttagtacattccccttggaagtctatatccggaggctcangaacatcanacgggcagtggccaactcctggtcgaagtcctaagactgtgattgttgtccggacaagcaatgcccaananctggggcctgangtgagcctttacaacaacgactggtacaactttcaactgggacactgtgcntcncaagatgttttcaagggttggagtcnaccttgtggntgcctgngagaagancttggggncaacanctggcccanaaactgcatccanaggaatgatgtgaanaacnacnggncatgntcttancnnaagtagcccccccgngacananctacccncaantgcncanancaacncnnncaatgnccntncacntgatt

SEQ ID NO: 255 - DNA, 801 bp, Artificial Sequence
  Description of Artificial Sequence: Note = Synthetic Construct
  misc_feature (10)..(10): n is a, c, g, or t
  misc_feature (111)..(111): n is a, c, g, or t
  misc_feature (113)..(113): n is a, c, g, or t
  misc_feature (355)..(355): n is a, c, g, or t
  misc_feature (526)..(526): n is a, c, g, or t
  misc_feature (604)..(604): n is a, c, g, or t
  misc_feature (657)..(657): n is a, c, g, or t
  misc_feature (708)..(708): n is a, c, g, or t
  misc_feature (718)..(718): n is a, c, g, or t
  misc_feature (781)..(781): n is a, c, g, or t
  misc_feature (786)..(786): n is a, c, g, or t
  misc_feature (792)..(792): n is a, c, g, or t
caattcaatnttaatcctggaagctcctttggcgaaaatgatagcttctggctgtgtatttgacctcaaaatgcagtatataactacttaaacctctaacctagttttctncntgaaaattctttcttaccgttccgttatggaaattaactgctgtggttactgaaaagcaaaaggcacgtgtgggttgacaggaatctgtcatttcccaaaacatatcatttcatttccaaaaatactacttaccaaattggtaataactggtatttcaaaactttgtttactaggcacctggcaatttaagcattttacatatatcaacctcatcctcaccacaagtaacaaatattcctgnttttacatatacggttgggccaaagagactaaatatgtaattcgaatttagacaactcaagcagaactgagagtcaggtctatggagtgtaacaactcccaaatggcttcacagtcagtggtcaaaagaatcccaatgtggatccgatcgtcctggagccacacagactangtcacacttcctaactcgtctctgcctgacctctgctcagtttatcagctaccacaagctaattccatatcagaacanaaaaaatgaaggtaccactatggttcgttcacctgacagggattttaggccanctcgttgcttttgacaactgtttgaaaatacaactgtttaatctctactcngtaaatccangaaaatgtccccgtctgcaaggatttaaacacgatttgggcggaaaaaggccacggtaaaacnccacncctccnaaggttccg

SEQ ID NO: 256 - DNA, 492 bp, Artificial Sequence
  Description of Artificial Sequence: Note = Synthetic Construct
attccaacagaattccagttgataaattaaaaaacaaacaaacagggctggagaggtggctcagcggttaagagcacccgactgctcttccagaggtcatgagttcaattcccagcaaccacatggtggctcacaaccatctataatgagatctggtgccctcttctggtgtatctaaagacagctacagtgtacttatatataataaattaataattcttattaaaaaaaaaaccatcataatccatccatccatggaaatttccagaccaggagctaagagatggttcagaattcaagagcgtttaccactttggtggagaacacatccatgtcagttgtctcataactgtacgtaagtccagcttcagggtatccaaagctgctagcctcagtagtttccttcactcaggggacattcacattcacacaagggcactcattcacatgattaatttaataatggtctttcttcagccagggatgggcata

SEQ ID NO: 257 - DNA, 1083 bp, Artificial Sequence
  Description of Artificial Sequence: Note = Synthetic Construct
  misc_feature (526)..(526): n is a, c, g, or t
  misc_feature (531)..(531): n is a, c, g, or t
  misc_feature (581)..(581): n is a, c, g, or t
  misc_feature (591)..(591): n is a, c, g, or t
  misc_feature (616)..(616): n is a, c, g, or t
  misc_feature (622)..(622): n is a, c, g, or t
  misc_feature (627)..(627): n is a, c, g, or t
  misc_feature (635)..(635): n is a, c, g, or t
  misc_feature (663)..(663): n is a, c, g, or t
  misc_feature (695)..(695): n is a, c, g, or t
  misc_feature (948)..(948): n is a, c, g, or t
  misc_feature (966)..(966): n is a, c, g, or t
  misc_feature (1012)..(1012): n is a, c, g, or t
acatttatatctacctataggattttatccaatgttgacttagccatggtagaactcttaactgcatctacacactatattgctcttgtaaccaaagatgctaatgagtgtatttgaattagcttctcctaggaggggtgactactttgctaaagagtatgaaaaatgttttgatggaagggacaagtttggttggtagtagagtgtttgtagcttatctggtaaaggaaattgagtgcatctgcatgcatagcacaagtaatccatcttctggcggttaactagagaaagcttatagtcagaggctcttgtgaatgcactgaagactgctgtgtctcaggagtttctcttgatgatctaccttttctgaattacttgaaaaggccaatgtgcttggttcgagttttttagtgaatatttacaatttcctgcttttatctagaaaagaagcaaaagggaaatatgaaagcagtatatataaaatctgtgctttggaattgatatttgcatttggtgattgtttttnatttnattcagctaaattttatgtgttgaatacttactctagaataactactttnggaactggangggggaaatctgtaaatggaaattnattttnatgtnctgaaatntgagggtttaggaatttgacttttgtgnaaagaatgctacggtattataaagctgtggangtttttttccactagtttcaggtgtttttttttttgttgttgttgttgttattttgaactacttaccaaaattagaagttaaaatctaattagaaattaataagatactaaaattcatgacagttttttgtttgtttgtttgtttgttttttggtatttcttgatttgggcataaaaggcacacccattctctcatgcttggaagaagctgctattcctactggctatctaagaagaatggaattattaattntatttgacttattaattntaaacgagtttaatttgggatcatttagtaagtactcttttctttntgagctgtgatagattatagtctagtttaagttgctcctaagtagacagatgaagaaactagggaggcttt

SEQ ID NO: 258 - DNA, 893 bp, Artificial Sequence
  Description of Artificial Sequence: Note = Synthetic Construct
  misc_feature (2)..(2): n is a, c, g, or t
  misc_feature (10)..(10): n is a, c, g, or t
  misc_feature (18)..(20): n is a, c, g, or t
  misc_feature (28)..(28): n is a, c, g, or t
  misc_feature (52)..(52): n is a, c, g, or t
  misc_feature (63)..(63): n is a, c, g, or t
  misc_feature (198)..(198): n is a, c, g, or t
  misc_feature (228)..(228): n is a, c, g, or t
  misc_feature (240)..(240): n is a, c, g, or t
  misc_feature (264)..(264): n is a, c, g, or t
  misc_feature (267)..(267): n is a, c, g, or t
  misc_feature (296)..(296): n is a, c, g, or t
  misc_feature (305)..(305): n is a, c, g, or t
  misc_feature (313)..(313): n is a, c, g, or t
  misc_feature (344)..(344): n is a, c, g, or t
  misc_feature (424)..(424): n is a, c, g, or t
  misc_feature (455)..(455): n is a, c, g, or t
  misc_feature (481)..(481): n is a, c, g, or t
  misc_feature (489)..(489): n is a, c, g, or t
  misc_feature (534)..(534): n is a, c, g, or t
  misc_feature (544)..(544): n is a, c, g, or t
  misc_feature (554)..(554): n is a, c, g, or t
  misc_feature (568)..(568): n is a, c, g, or t
  misc_feature (580)..(580): n is a, c, g, or t
  misc_feature (603)..(603): n is a, c, g, or t
  misc_feature (609)..(609): n is a, c, g, or t
  misc_feature (652)..(652): n is a, c, g, or t
  misc_feature (693)..(694): n is a, c, g, or t
  misc_feature (733)..(733): n is a, c, g, or t
  misc_feature (736)..(736): n is a, c, g, or t
  misc_feature (738)..(738): n is a, c, g, or t
  misc_feature (745)..(745): n is a, c, g, or t
  misc_feature (751)..(751): n is a, c, g, or t
  misc_feature (753)..(753): n is a, c, g, or t
  misc_feature (757)..(757): n is a, c, g, or t
  misc_feature (775)..(775): n is a, c, g, or t
  misc_feature (779)..(779): n is a, c, g, or t
  misc_feature (787)..(787): n is a, c, g, or t
  misc_feature (791)..(791): n is a, c, g, or t
  misc_feature (793)..(793): n is a, c, g, or t
  misc_feature (798)..(798): n is a, c, g, or t
  misc_feature (814)..(815): n is a, c, g, or t
  misc_feature (817)..(817): n is a, c, g, or t
  misc_feature (842)..(842): n is a, c, g, or t
  misc_feature (849)..(851): n is a, c, g, or t
  misc_feature (864)..(864): n is a, c, g, or t
  misc_feature (873)..(873): n is a, c, g, or t
  misc_feature (875)..(875): n is a, c, g, or t
  misc_feature (880)..(881): n is a, c, g, or t
  misc_feature (886)..(886): n is a, c, g, or t
cnatcccccntcttgatnnngcttcccntttaagagatctaagcctgggtgncggacccttcnacttctcacgtctccataattttctctgtccttcttggtacccggggtacccttggtacattggtcaggacatccatgtatgggcaggggtgcacgtggcttcagtttccaaagttcttatctctcaccagacancttctcccctgggttgagacatatcagganaactgttttgancttggctgcaggcctgtggaggcncangaagtccaccttctctcaatctttggctncccggtacnctcatccnttaactctaatgtggggacacgtttcagtangtattgaaaactcagcctacattctgatgaaagcgaccacgtcatgaaggatcgttccggggatggcatccaaaaggaantcaaaatggctcaaaacacttttggccccanatccaaaaatctttgaaatgtggccntttccccnaacaataatgagtaactccccctccctctctgacaaatatttcangtctattatntgccatgacnaaccgggccgggantgaaacatgacnacctgaaaaacgtgccggtctcnggaacngctggtgggcccggaaaagtcctttcaaacagctaggccttcnccgggttcaaattaacaaacaggttttaaattccaggaacnnttttataaagaaggggggtaaaggaggaggtctttactnaantnacaaacncctccngnaaancttggggcccccttttcnattnggacccgngaantnccccnttttggccccccgccnnangtccattcccccccttccaaaaacnaaccccnnngggaccccggganaaccccccncnaaaannggcgntccccca

SEQ ID NO: 259 - DNA, 916 bp, Artificial Sequence
  Description of Artificial Sequence: Note = Synthetic Construct
  misc_feature (4)..(4): n is a, c, g, or t
  misc_feature (22)..(22): n is a, c, g, or t
  misc_feature (36)..(36): n is a, c, g, or t
  misc_feature (158)..(158): n is a, c, g, or t
  misc_feature (326)..(326): n is a, c, g, or t
  misc_feature (349)..(349): n is a, c, g, or t
  misc_feature (372)..(372): n is a, c, g, or t
  misc_feature (447)..(447): n is a, c, g, or t
  misc_feature (506)..(506): n is a, c, g, or t
  misc_feature (530)..(530): n is a, c, g, or t
  misc_feature (551)..(551): n is a, c, g, or t
  misc_feature (577)..(577): n is a, c, g, or t
  misc_feature (579)..(579): n is a, c, g, or t
  misc_feature (607)..(607): n is a, c, g, or t
  misc_feature (610)..(610): n is a, c, g, or t
  misc_feature (618)..(618): n is a, c, g, or t
  misc_feature (632)..(632): n is a, c, g, or t
  misc_feature (646)..(646): n is a, c, g, or t
  misc_feature (654)..(654): n is a, c, g, or t
  misc_feature (681)..(681): n is a, c, g, or t
  misc_feature (716)..(716): n is a, c, g, or t
  misc_feature (738)..(738): n is a, c, g, or t
  misc_feature (754)..(754): n is a, c, g, or t
  misc_feature (770)..(770): n is a, c, g, or t
  misc_feature (782)..(782): n is a, c, g, or t
  misc_feature (790)..(790): n is a, c, g, or t
  misc_feature (812)..(812): n is a, c, g, or t
  misc_feature (820)..(820): n is a, c, g, or t
  misc_feature (822)..(822): n is a, c, g, or t
  misc_feature (828)..(828): n is a, c, g, or t
  misc_feature (841)..(842): n is a, c, g, or t
  misc_feature (851)..(851): n is a, c, g, or t
  misc_feature (856)..(857): n is a, c, g, or t
  misc_feature (859)..(859): n is a, c, g, or t
  misc_feature (865)..(865): n is a, c, g, or t
  misc_feature (880)..(880): n is a, c, g, or t
  misc_feature (885)..(885): n is a, c, g, or t
  misc_feature (887)..(887): n is a, c, g, or t
  misc_feature (891)..(891): n is a, c, g, or t
  misc_feature (895)..(896): n is a, c, g, or t
  misc_feature (900)..(900): n is a, c, g, or t
  misc_feature (909)..(909): n is a, c, g, or t
  misc_feature (913)..(913): n is a, c, g, or t
attnacacagttatctttgccnttatttttgctaangtgatggagtctcgtggtagcccaggttggccacaaagtcactctgcagcacgagcatggcgttgaatttctggtattcctgcctccgcccgctaagcctgtgatcatgaactgtgtaccancaccgtgcctggttgccactggggaactcttattattgcctttgtatttgtgttctgcaaatgaagtctaaggggacagtggaatcttgactttcttgtggtcctgagtcaggatctccttctcactattccccgacatcctgtcccctgccaggcctcttcccctcntcctatgctgtggtttctgccancctccacttggggaggtgactanggggtgacagtggaggaggtctgtgttcctctgtcctgggatggagatgcctccgcacatgtggctggtgatgtntgtgtcctgcctaagctcagagatggccgtgtggtttctcattctccgtgggttctacntcaacattttacaacagaacttcntgaacagtgatatcctcgacnactggggatggggaatggtagaatananaattcctgtttaatctagcttttaagtntanctggctangcacaaacaatgcntttccctagtgaangggaacanaaacgtaagaacacagaatagagaaantagcaaatcctgaaaaagtctccaatgcatgttgnacatctctcgcaacaaggaagnaagtggcttcagaaanctactagggcacaaanatttggtcaagngccataanggtcgccggatatttgaaaagnaataggancnagatantgccgtgcaaaannaggtgttanaatanncnaaatcnacaaggaggaaaagntaccncngcanggtnnaagnggcattcanaagngca

SEQ ID NO: 260 - DNA, 857 bp, Artificial Sequence
  Description of Artificial Sequence: Note = Synthetic Construct
  misc_feature (4)..(4): n is a, c, g, or t
  misc_feature (6)..(7): n is a, c, g, or t
  misc_feature (9)..(9): n is a, c, g, or t
  misc_feature (12)..(13): n is a, c, g, or t
  misc_feature (19)..(19): n is a, c, g, or t
  misc_feature (22)..(23): n is a, c, g, or t
  misc_feature (27)..(27): n is a, c, g, or t
  misc_feature (34)..(34): n is a, c, g, or t
  misc_feature (36)..(36): n is a, c, g, or t
  misc_feature (39)..(39): n is a, c, g, or t
  misc_feature (41)..(41): n is a, c, g, or t
  misc_feature (43)..(43): n is a, c, g, or t
  misc_feature (49)..(51): n is a, c, g, or t
  misc_feature (60)..(60): n is a, c, g, or t
  misc_feature (62)..(62): n is a, c, g, or t
  misc_feature (67)..(71): n is a, c, g, or t
  misc_feature (73)..(74): n is a, c, g, or t
  misc_feature (84)..(84): n is a, c, g, or t
  misc_feature (88)..(88): n is a, c, g, or t
  misc_feature (93)..(93): n is a, c, g, or t
  misc_feature (96)..(96): n is a, c, g, or t
  misc_feature (100)..(101): n is a, c, g, or t
  misc_feature (105)..(105): n is a, c, g, or t
  misc_feature (120)..(120): n is a, c, g, or t
  misc_feature (123)..(123): n is a, c, g, or t
  misc_feature (127)..(127): n is a, c, g, or t
  misc_feature (136)..(136): n is a, c, g, or t
  misc_feature (138)..(138): n is a, c, g, or t
  misc_feature (140)..(140): n is a, c, g, or t
  misc_feature (148)..(148): n is a, c, g, or t
  misc_feature (153)..(153): n is a, c, g, or t
  misc_feature (158)..(158): n is a, c, g, or t
  misc_feature (160)..(160): n is a, c, g, or t
  misc_feature (170)..(170): n is a, c, g, or t
  misc_feature (175)..(175): n is a, c, g, or t
  misc_feature (177)..(177): n is a, c, g, or t
  misc_feature (180)..(181): n is a, c, g, or t
  misc_feature (183)..(183): n is a, c, g, or t
  misc_feature (185)..(185): n is a, c, g, or t
  misc_feature (187)..(187): n is a, c, g, or t
  misc_feature (190)..(190): n is a, c, g, or t
  misc_feature (194)..(194): n is a, c, g, or t
  misc_feature (198)..(198): n is a, c, g, or t
  misc_feature (202)..(202): n is a, c, g, or t
  misc_feature (204)..(207): n is a, c, g, or t
  misc_feature (221)..(221): n is a, c, g, or t
  misc_feature (227)..(227): n is a, c, g, or t
  misc_feature (233)..(233): n is a, c, g, or t
  misc_feature (237)..(237): n is a, c, g, or t
  misc_feature (239)..(239): n is a, c, g, or t
  misc_feature (245)..(247): n is a, c, g, or t
  misc_feature (249)..(249): n is a, c, g, or t
  misc_feature (251)..(251): n is a, c, g, or t
  misc_feature (258)..(258): n is a, c, g, or t
  misc_feature (265)..(267): n is a, c, g, or t
  misc_feature (271)..(272): n is a, c, g, or t
  misc_feature (287)..(287): n is a, c, g, or t
  misc_feature (291)..(292): n is a, c, g, or t
  misc_feature (297)..(299): n is a, c, g, or t
  misc_feature (303)..(303): n is a, c, g, or t
  misc_feature (307)..(307): n is a, c, g, or t
  misc_feature (311)..(311): n is a, c, g, or t
  misc_feature (315)..(315): n is a, c, g, or t
  misc_feature (318)..(320): n is a, c, g, or t
  misc_feature (322)..(322): n is a, c, g, or t
  misc_feature (330)..(333): n is a, c, g, or t
  misc_feature (335)..(335): n is a, c, g, or t
  misc_feature (337)..(337): n is a, c, g, or t
  misc_feature (347)..(354): n is a, c, g, or t
  misc_feature (356)..(357): n is a, c, g, or t
  misc_feature (362)..(362): n is a, c, g, or t
  misc_feature (364)..(364): n is a, c, g, or t
  misc_feature (367)..(367): n is a, c, g, or t
  misc_feature (376)..(376): n is a, c, g, or t
  misc_feature (382)..(383): n is a, c, g, or t
  misc_feature (386)..(386): n is a, c, g, or t
  misc_feature (389)..(391): n is a, c, g, or t
  misc_feature (395)..(395): n is a, c, g, or t
  misc_feature (398)..(398): n is a, c, g, or t
  misc_feature (403)..(403): n is a, c, g, or t
  misc_feature (406)..(406): n is a, c, g, or t
  misc_feature (413)..(414): n is a, c, g, or t
  misc_feature (416)..(416): n is a, c, g, or t
  misc_feature (422)..(422): n is a, c, g, or t
  misc_feature (424)..(424): n is a, c, g, or t
  misc_feature (426)..(426): n is a, c, g, or t
  misc_feature (428)..(429): n is a, c, g, or t
  misc_feature (434)..(434): n is a, c, g, or t
  misc_feature (439)..(439): n is a, c, g, or t
  misc_feature (441)..(441): n is a, c, g, or t
  misc_feature (443)..(443): n is a, c, g, or t
  misc_feature (445)..(445): n is a, c, g, or t
  misc_feature (447)..(447): n is a, c, g, or t
  misc_feature (449)..(449): n is a, c, g, or t
  misc_feature (451)..(451): n is a, c, g, or t
  misc_feature (453)..(453): n is a, c, g, or t
  misc_feature (455)..(455): n is a, c, g, or t
  misc_feature (457)..(457): n is a, c, g, or t
  misc_feature (459)..(459): n is a, c, g, or t
  misc_feature (461)..(461): n is a, c, g, or t
  misc_feature (463)..(463): n is a, c, g, or t
  misc_feature (465)..(465): n is a, c, g, or t
  misc_feature (467)..(467): n is a, c, g, or t
  misc_feature (469)..(469): n is a, c, g, or t
  misc_feature (471)..(471): n is a, c, g, or t
  misc_feature (473)..(473): n is a, c, g, or t
  misc_feature (475)..(476): n is a, c, g, or t
  misc_feature (480)..(480): n is a, c, g, or t
  misc_feature (483)..(483): n is a, c, g, or t
  misc_feature (485)..(485): n is a, c, g, or t
  misc_feature (487)..(487): n is a, c, g, or t
  misc_feature (489)..(489): n is a, c, g, or t
  misc_feature (494)..(496): n is a, c, g, or t
  misc_feature (498)..(498): n is a, c, g, or t
  misc_feature (500)..(500): n is a, c, g, or t
  misc_feature (504)..(504): n is a, c, g, or t
  misc_feature (507)..(507): n is a, c, g, or t
  misc_feature (513)..(515): n is a, c, g, or t
  misc_feature (517)..(517): n is a, c, g, or t
  misc_feature (519)..(520): n is a, c, g, or t
  misc_feature (522)..(524): n is a, c, g, or t
  misc_feature (526)..(526): n is a, c, g, or t
  misc_feature (528)..(529): n is a, c, g, or t
  misc_feature (535)..(535): n is a, c, g, or t
  misc_feature (537)..(537): n is a, c, g, or t
  misc_feature (540)..(541): n is a, c, g, or t
  misc_feature (545)..(545): n is a, c, g, or t
  misc_feature (547)..(547): n is a, c, g, or t
  misc_feature (549)..(549): n is a, c, g, or t
  misc_feature (555)..(555): n is a, c, g, or t
  misc_feature (557)..(557): n is a, c, g, or t
  misc_feature (564)..(564): n is a, c, g, or t
  misc_feature (567)..(567): n is a, c, g, or t
  misc_feature (574)..(574): n is a, c, g, or t
  misc_feature (576)..(576): n is a, c, g, or t
  misc_feature (580)..(580): n is a, c, g, or t
  misc_feature (590)..(590): n is a, c, g, or t
  misc_feature (592)..(592): n is a, c, g, or t
  misc_feature (596)..(596): n is a, c, g, or t
  misc_feature (603)..(603): n is a, c, g, or t
  misc_feature (608)..(608): n is a, c, g, or t
  misc_feature (614)..(614): n is a, c, g, or t
  misc_feature (624)..(625): n is a, c, g, or t
  misc_feature (627)..(627): n is a, c, g, or t
  misc_feature (629)..(629): n is a, c, g, or t
  misc_feature (631)..(631): n is a, c, g, or t
  misc_feature (634)..(634): n is a, c, g, or t
  misc_feature (639)..(641): n is a, c, g, or t
  misc_feature (643)..(643): n is a, c, g, or t
  misc_feature (646)..(646): n is a, c, g, or t
  misc_feature (648)..(648): n is a, c, g, or t
  misc_feature (652)..(652): n is a, c, g, or t
  misc_feature (656)..(656): n is a, c, g, or t
  misc_feature (659)..(659): n is a, c, g, or t
  misc_feature (662)..(662): n is a, c, g, or t
  misc_feature (664)..(664): n is a, c, g, or t
  misc_feature (668)..(668): n is a, c, g, or t
  misc_feature (670)..(670): n is a, c, g, or t
  misc_feature (674)..(674): n is a, c, g, or t
  misc_feature (676)..(676): n is a, c, g, or t
  misc_feature (678)..(678): n is a, c, g, or t
  misc_feature (686)..(686): n is a, c, g, or t
  misc_feature (693)..(694): n is a, c, g, or t
  misc_feature (701)..(701): n is a, c, g, or t
  misc_feature (709)..(714): n is a, c, g, or t
  misc_feature (718)..(720): n is a, c, g, or t
  misc_feature (732)..(732): n is a, c, g, or t
  misc_feature (735)..(736): n is a, c, g, or t
  misc_feature (738)..(738): n is a, c, g, or t
  misc_feature (745)..(745): n is a, c, g, or t
  misc_feature (748)..(748): n is a, c, g, or t
  misc_feature (751)..(751): n is a, c, g, or t
  misc_feature (754)..(754): n is a, c, g, or t
  misc_feature (758)..(758): n is a, c, g, or t
  misc_feature (760)..(762): n is a, c, g, or t
  misc_feature (771)..(773): n is a, c, g, or t
  misc_feature (776)..(777): n is a, c, g, or t
  misc_feature (783)..(783): n is a, c, g, or t
  misc_feature (786)..(788): n is a, c, g, or t
  misc_feature (792)..(792): n is a, c, g, or t
  misc_feature (797)..(797): n is a, c, g, or t
  misc_feature (799)..(799): n is a, c, g, or t
  misc_feature (801)..(801): n is a, c, g, or t
  misc_feature (803)..(803): n is a, c, g, or t
  misc_feature (810)..(810): n is a, c, g, or t
  misc_feature (812)..(813): n is a, c, g, or t
  misc_feature (817)..(817): n is a, c, g, or t
  misc_feature (822)..(822): n is a, c, g, or t
  misc_feature (827)..(830): n is a, c, g, or t
  misc_feature (834)..(834): n is a, c, g, or t
  misc_feature (840)..(840): n is a, c, g, or t
  misc_feature (843)..(843): n is a, c, g, or t
  misc_feature (845)..(845): n is a, c, g, or t
  misc_feature (853)..(853): n is a, c, g, or t
  misc_feature (856)..(856): n is a, c, g, or t
cacncnncncannaagcgnccnnaccnacaaccngnaangngngccccnnnaaagaaaanancaaannnnngnnagccgaagcngagnaacanggngaanncaanccccagcaaccacanggnggcncacaaccancngnaaagaganccgangcccncngaagacagcnacagngnacnnanananaanaaangaanaaancnnnnaaaaaaaaggaaangaggcnggggangagncncagaannngngnagcaaanacagaannngggnngcccccaaagagacnagannaaggnnngcancacnggcncacnagnnncncaaagagnnnngngncaagaccccnnnnnnnncnnccagngnccngccccaggnaccaannganggnnnaagncancaccngcngccaggnncngcaggngngngnnccccncccgngngngngngngngngngngngngngngngngngngnncccngcnancncncccannncngncccnggngccccnnncngnncnnngncnnaaggcncngcnncagncngncagccngnaaaaccncanaaaaaancncccncaggaagganancccnaacccangacanccgaanccacaggcgnnancngnaanaagannnangancngganaccnggnacngngggngnccancnanccgaaaangggcccnncaaaacngggacgannnnnngggnnnggggacaaaacngcnncnaacaaanccnggnggngaancnnngaggccgannnggnnccccanggnnnccangaggngncnancaaaaancnncggnggggnccgannnngggnagggcnccngnaggggccncanc

SEQ ID NO: 261 - DNA, 795 bp, Artificial Sequence
  Description of Artificial Sequence: Note = Synthetic Construct
  misc_feature (4)..(7): n is a, c, g, or t
  misc_feature (13)..(13): n is a, c, g, or t
  misc_feature (17)..(17): n is a, c, g, or t
  misc_feature (21)..(25): n is a, c, g, or t
  misc_feature (28)..(28): n is a, c, g, or t
  misc_feature (35)..(35): n is a, c, g, or t
  misc_feature (38)..(39): n is a, c, g, or t
  misc_feature (41)..(41): n is a, c, g, or t
  misc_feature (43)..(44): n is a, c, g, or t
  misc_feature (47)..(49): n is a, c, g, or t
  misc_feature (53)..(53): n is a, c, g, or t
  misc_feature (57)..(58): n is a, c, g, or t
  misc_feature (60)..(60): n is a, c, g, or t
  misc_feature (63)..(63): n is a, c, g, or t
  misc_feature (66)..(67): n is a, c, g, or t
  misc_feature (70)..(70): n is a, c, g, or t
  misc_feature (72)..(73): n is a, c, g, or t
  misc_feature (76)..(76): n is a, c, g, or t
  misc_feature (87)..(87): n is a, c, g, or t
  misc_feature (90)..(91): n is a, c, g, or t
  misc_feature (93)..(93): n is a, c, g, or t
  misc_feature (96)..(96): n is a, c, g, or t
  misc_feature (99)..(99): n is a, c, g, or t
  misc_feature (101)..(102): n is a, c, g, or t
  misc_feature (104)..(104): n is a, c, g, or t
  misc_feature (107)..(107): n is a, c, g, or t
  misc_feature (109)..(110): n is a, c, g, or t
  misc_feature (113)..(114): n is a, c, g, or t
  misc_feature (118)..(118): n is a, c, g, or t
  misc_feature (128)..(128): n is a, c, g, or t
  misc_feature (130)..(130): n is a, c, g, or t
  misc_feature (134)..(136): n is a, c, g, or t
  misc_feature (141)..(141): n is a, c, g, or t
  misc_feature (143)..(143): n is a, c, g, or t
  misc_feature (148)..(149): n is a, c, g, or t
  misc_feature (154)..(154): n is a, c, g, or t
  misc_feature (157)..(157): n is a, c, g, or t
  misc_feature (159)..(160): n is a, c, g, or t
  misc_feature (162)..(162): n is a, c, g, or t
  misc_feature (164)..(165): n is a, c, g, or t
  misc_feature (167)..(167): n is a, c, g, or t
  misc_feature (170)..(171): n is a, c, g, or t
  misc_feature (174)..(174): n is a, c, g, or t
  misc_feature (177)..(178): n is a, c, g, or t
  misc_feature (180)..(181): n is a, c, g, or t
  misc_feature (187)..(187): n is a, c, g, or t
  misc_feature (189)..(189): n is a, c, g, or t
  misc_feature (192)..(192): n is a, c, g, or t
  misc_feature (195)..(195): n is a, c, g, or t
  misc_feature (209)..(209): n is a, c, g, or t
  misc_feature (211)..(211): n is a, c, g, or t
  misc_feature (213)..(213): n is a, c, g, or t
  misc_feature (215)..(215): n is a, c, g, or t
  misc_feature (217)..(217): n is a, c, g, or t
  misc_feature (220)..(221): n is a, c, g, or t
  misc_feature (226)..(226): n is a, c, g, or t
  misc_feature (228)..(229): n is a, c, g, or t
  misc_feature (231)..(231): n is a, c, g, or t
  misc_feature (233)..(233): n is a, c, g, or t
  misc_feature (236)..(236): n is a, c, g, or t
  misc_feature (241)..(242): n is a, c, g, or t
  misc_feature (245)..(246): n is a, c, g, or t
  misc_feature (248)..(248): n is a, c, g, or t
  misc_feature (250)..(250): n is a, c, g, or t
  misc_feature (253)..(253): n is a, c, g, or t
  misc_feature (258)..(258): n is a, c, g, or t
  misc_feature (270)..(272): n is a, c, g, or t
  misc_feature (276)..(281): n is a, c, g, or t
  misc_feature (292)..(292): n is a, c, g, or t
  misc_feature (295)..(295): n is a, c, g, or t
  misc_feature (298)..(300): n is a, c, g, or t
  misc_feature (302)..(302): n is a, c, g, or t
  misc_feature (305)..(308): n is a, c, g, or t
  misc_feature (310)..(310): n is a, c, g, or t
  misc_feature (317)..(317): n is a, c, g, or t
  misc_feature (319)..(320): n is a, c, g, or t
  misc_feature (322)..(322): n is a, c, g, or t
  misc_feature (327)..(327): n is a, c, g, or t
  misc_feature (332)..(332): n is a, c, g, or t
  misc_feature (336)..(336): n is a, c, g, or t
  misc_feature (342)..(343): n is a, c, g, or t
  misc_feature (349)..(349): n is a, c, g, or t
  misc_feature (351)..(351): n is a, c, g, or t
  misc_feature (353)..(353): n is a, c, g, or t
  misc_feature (361)..(362): n is a, c, g, or t
  misc_feature (369)..(369): n is a, c, g, or t
  misc_feature (371)..(371): n is a, c, g, or t
  misc_feature (374)..(374): n is a, c, g, or t
  misc_feature (376)..(376): n is a, c, g, or t
  misc_feature (380)..(381): n is a, c, g, or t
  misc_feature (386)..(386): n is a, c, g, or t
  misc_feature (391)..(393): n is a, c, g, or t
  misc_feature (399)..(401): n is a, c, g, or t
  misc_feature (403)..(404): n is a, c, g, or t
  misc_feature (408)..(410): n is a, c, g, or t
  misc_feature (412)..(412): n is a, c, g, or t
  misc_feature (414)..(414): n is a, c, g, or t
  misc_feature (416)..(417): n is a, c, g, or t
  misc_feature (421)..(421): n is a, c, g, or t
  misc_feature (423)..(423): n is a, c, g, or t
  misc_feature (429)..(429): n is a, c, g, or t
  misc_feature (432)..(432): n is a, c, g, or t
  misc_feature (438)..(439): n is a, c, g, or t
  misc_feature (441)..(442): n is a, c, g, or t
  misc_feature (444)..(444): n is a, c, g, or t
  misc_feature (447)..(448): n is a, c, g, or t
  misc_feature (451)..(452): n is a, c, g, or t
  misc_feature (454)..(454): n is a, c, g, or t
  misc_feature (461)..(461): n is a, c, g, or t
  misc_feature (464)..(464): n is a, c, g, or t
  misc_feature (466)..(466): n is a, c, g, or t
  misc_feature (470)..(470): n is a, c, g, or t
  misc_feature (473)..(473): n is a, c, g, or t
  misc_feature (475)..(475): n is a, c, g, or t
  misc_feature (480)..(480): n is a, c, g, or t
  misc_feature (483)..(483): n is a, c, g, or t
  misc_feature (485)..(485): n is a, c, g, or t
  misc_feature (490)..(490): n is a, c, g, or t
  misc_feature (497)..(498): n is a, c, g, or t
  misc_feature (504)..(504): n is a, c, g, or t
  misc_feature (507)..(507): n is a, c, g, or t
  misc_feature (510)..(510): n is a, c, g, or t
  misc_feature (512)..(512): n is a, c, g, or t
  misc_feature (515)..(515): n is a, c, g, or t
  misc_feature (521)..(521): n is a, c, g, or t
  misc_feature (523)..(524): n is a, c, g, or t
  misc_feature (526)..(526): n is a, c, g, or t
  misc_feature (529)..(530): n is a, c, g, or t
  misc_feature (534)..(535): n is a, c, g, or t
  misc_feature (538)..(539): n is a, c, g, or t
  misc_feature (544)..(544): n is a, c, g, or t
  misc_feature (547)..(547): n is a, c, g, or t
  misc_feature (552)..(552): n is a, c, g, or t
  misc_feature (554)..(554): n is a, c, g, or t
  misc_feature (560)..(560): n is a, c, g, or t
  misc_feature (564)..(564): n is a, c, g, or t
  misc_feature (568)..(568): n is a, c, g, or t
  misc_feature (573)..(577): n is a, c, g, or t
  misc_feature (583)..(584): n is a, c, g, or t
  misc_feature (587)..(589): n is a, c, g, or t
  misc_feature (593)..(593): n is a, c, g, or t
  misc_feature (595)..(595): n is a, c, g, or t
  misc_feature (603)..(603): n is a, c, g, or t
  misc_feature (605)..(607): n is a, c, g, or t
  misc_feature (611)..(611): n is a, c, g, or t
  misc_feature (615)..(615): n is a, c, g, or t
  misc_feature (618)..(618): n is a, c, g, or t
  misc_feature (620)..(620): n is a, c, g, or t
  misc_feature (629)..(629): n is a, c, g, or t
  misc_feature (631)..(632): n is a, c, g, or t
  misc_feature (637)..(637): n is a, c, g, or t
  misc_feature (643)..(643): n is a, c, g, or t
  misc_feature (648)..(648): n is a, c, g, or t
  misc_feature (650)..(650): n is a, c, g, or t
  misc_feature (654)..(655): n is a, c, g, or t
  misc_feature (657)..(657): n is a, c, g, or t
  misc_feature (660)..(661): n is a, c, g, or t
  misc_feature (667)..(667): n is a, c, g, or t
  misc_feature (669)..(669): n is a, c, g, or t
  misc_feature (674)..(675): n is a, c, g, or t
  misc_feature (678)..(680): n is a, c, g, or t
  misc_feature (682)..(683): n is a, c, g, or t
  misc_feature (690)..(690): n is a, c, g, or t
  misc_feature (695)..(696): n is a, c, g, or t
  misc_feature (699)..(700): n is a, c, g, or t
  misc_feature (706)..(707): n is a, c, g, or t
  misc_feature (709)..(712): n is a, c, g, or t
  misc_feature (717)..(717): n is a, c, g, or t
  misc_feature (722)..(723): n is a, c, g, or t
  misc_feature (725)..(725): n is a, c, g, or t
  misc_feature (728)..(728): n is a, c, g, or t
  misc_feature (734)..(735): n is a, c, g, or t
  misc_feature (739)..(740): n is a, c, g, or t
  misc_feature (742)..(743): n is a, c, g, or t
  misc_feature (745)..(745): n is a, c, g, or t
  misc_feature (757)..(757): n is a, c, g, or t
  misc_feature (759)..(759): n is a, c, g, or t
  misc_feature (764)..(766): n is a, c, g, or t
  misc_feature (768)..(771): n is a, c, g, or t
  misc_feature (775)..(776): n is a, c, g, or t
  misc_feature (787)..(787): n is a, c, g, or t
  misc_feature (790)..(791): n is a, c, g, or t
caannnncagaancacnggcnnnnnaanaagacanccnngngnncannncccnaacnnanganccnnccncnngangaaccgaaacnganngnccncgngnncnccngnngcnngagngaacacgccngncggnnnggacngngcacnnaagancancnncngnncngannccncanngnncccgcncncgnccnccgggcgcccgggncnanangncannacgcncnnancnggngcccnnaannancngcnggacnaagccccccggnnnccgnnnnnngccacaagggnccnccnnncngcnnnncngcaccancnngncccgnacccnggangggacnngcgacnangnggcgaagnncccgggncngancnccannggccnccccnnncccccnnngnnaacnnncncncnnagcngngacagnacnggcggnncnngngcnnganncnggggccngancnccgnccncncaccnaancncgccncaaaacnnacccanccncgngnaanacacgncnngncgnncagnnganncgacnacnagccncnggggcncccncccnaaaannnnnccaagnncannncccngnccaacggnannncccnccgnacncnggaaaacancnnggggnccccgncaaangncccnncngannccccancngacgnnagnnncnnacaccanggaanncgnngcaccnncnnnngaaanaccgnncnaanccaccnnccgnngnngnaacccccgaacncngcccnnnannnnaaannccaaggacggnccnnaccc

SEQ ID NO: 262 - DNA, 700 bp, Artificial Sequence
  Description of Artificial Sequence: Note = Synthetic Construct
  misc_feature (25)..(25): n is a, c, g, or t
  misc_feature (57)..(57): n is a, c, g, or t
  misc_feature (64)..(64): n is a, c, g, or t
  misc_feature (68)..(69): n is a, c, g, or t
  misc_feature (71)..(72): n is a, c, g, or t
  misc_feature (84)..(84): n is a, c, g, or t
  misc_feature (98)..(98): n is a, c, g, or t
  misc_feature (108)..(108): n is a, c, g, or t
  misc_feature (110)..(110): n is a, c, g, or t
  misc_feature (112)..(113): n is a, c, g, or t
  misc_feature (123)..(123): n is a, c, g, or t
  misc_feature (126)..(126): n is a, c, g, or t
  misc_feature (142)..(142): n is a, c, g, or t
  misc_feature (144)..(144): n is a, c, g, or t
  misc_feature (146)..(146): n is a, c, g, or t
  misc_feature (150)..(150): n is a, c, g, or t
  misc_feature (155)..(155): n is a, c, g, or t
  misc_feature (164)..(164): n is a, c, g, or t
  misc_feature (170)..(170): n is a, c, g, or t
  misc_feature (173)..(173): n is a, c, g, or t
  misc_feature (196)..(196): n is a, c, g, or t
  misc_feature (218)..(218): n is a, c, g, or t
  misc_feature (269)..(269): n is a, c, g, or t
  misc_feature (280)..(280): n is a, c, g, or t
  misc_feature (299)..(299): n is a, c, g, or t
  misc_feature (316)..(316): n is a, c, g, or t
  misc_feature (353)..(353): n is a, c, g, or t
  misc_feature (375)..(375): n is a, c, g, or t
  misc_feature (381)..(381): n is a, c, g, or t
  misc_feature (405)..(405): n is a, c, g, or t
  misc_feature (407)..(407): n is a, c, g, or t
  misc_feature (420)..(420): n is a, c, g, or t
  misc_feature (437)..(437): n is a, c, g, or t
  misc_feature (455)..(455): n is a, c, g, or t
  misc_feature (476)..(476): n is a, c, g, or t
  misc_feature (478)..(478): n is a, c, g, or t
  misc_feature (498)..(498): n is a, c, g, or t
  misc_feature (521)..(521): n is a, c, g, or t
  misc_feature (534)..(534): n is a, c, g, or t
  misc_feature (536)..(536): n is a, c, g, or t
  misc_feature (553)..(553): n is a, c, g, or t
  misc_feature (565)..(565): n is a, c, g, or t
  misc_feature (581)..(582): n is a, c, g, or t
  misc_feature (584)..(584): n is a, c, g, or t
  misc_feature (601)..(601): n is a, c, g, or t
  misc_feature (603)..(603): n is a, c, g, or t
  misc_feature (613)..(613): n is a, c, g, or t
  misc_feature (615)..(615): n is a, c, g, or t
  misc_feature (629)..(629): n is a, c, g, or t
  misc_feature (638)..(638): n is a, c, g, or t
  misc_feature (643)..(643): n is a, c, g, or t
  misc_feature (646)..(646): n is a, c, g, or t
  misc_feature (655)..(655): n is a, c, g, or t
  misc_feature (660)..(660): n is a, c, g, or t
  misc_feature (680)..(680): n is a, c, g, or t
  misc_feature (697)..(697): n is a, c, g, or t
  misc_feature (700)..(700): n is a, c, g, or t
tgtagcagcctagttttctttatanaggcagggaatagtattcgcaaatggagctgnaccttcnaagnnanntctcttcgttcntaacgggattcacntgtaggaagnananntttcaacatntangtacgggaaattttcncnantggnactgnactttttangtgaanttncttcattccaagcgggactctantgtggcacagcgtacttttcangatacaggaactgcaggttttcacgaatggagctgcattttctaagcgaantccatgatccntatattggtaagggagttnaagcctgagtgagggantccttcctcttctcacgtctgccataattttctctgnccttcatggtacccggggtacncttggnacattggtcacgagatccatgtangngcaggggtgcacntggattcagtttccagngttcttatctctcaccanactatctcgaacgtggggacnangtttcagtgagtactgaaanctcaccctacattctgatgaaancgatcacgtcatnantgagcttcttcccctgngttgagacattncaggagaactgtttgnnantggctgcaggcctgtgnanggagacgatntncaccttcagacaancacagggcnttccnggnaaacctcancatancgtccggggatggcattcancgggaatcctgattggncan

SEQ ID NO: 263 - DNA, 438 bp, Artificial Sequence
  Description of Artificial Sequence: Note = Synthetic Construct
  misc_feature (2)..(3): n is a, c, g, or t
  misc_feature (6)..(9): n is a, c, g, or t
  misc_feature (12)..(13): n is a, c, g, or t
  misc_feature (21)..(22): n is a, c, g, or t
  misc_feature (26)..(27): n is a, c, g, or t
  misc_feature (32)..(32): n is a, c, g, or t
  misc_feature (40)..(40): n is a, c, g, or t
  misc_feature (48)..(48): n is a, c, g, or t
  misc_feature (51)..(51): n is a, c, g, or t
  misc_feature (54)..(54): n is a, c, g, or t
  misc_feature (57)..(57): n is a, c, g, or t
  misc_feature (61)..(62): n is a, c, g, or t
  misc_feature (66)..(66): n is a, c, g, or t
  misc_feature (71)..(71): n is a, c, g, or t
  misc_feature (73)..(73): n is a, c, g, or t
  misc_feature (76)..(76): n is a, c, g, or t
  misc_feature (78)..(78): n is a, c, g, or t
  misc_feature (82)..(82): n is a, c, g, or t
  misc_feature (86)..(86): n is a, c, g, or t
  misc_feature (88)..(88): n is a, c, g, or t
  misc_feature (96)..(96): n is a, c, g, or t
  misc_feature (106)..(106): n is a, c, g, or t
  misc_feature (115)..(115): n is a, c, g, or t
  misc_feature (123)..(123): n is a, c, g, or t
  misc_feature (130)..(130): n is a, c, g, or t
  misc_feature (138)..(138): n is a, c, g, or t
  misc_feature (140)..(140): n is a, c, g, or t
  misc_feature (145)..(145): n is a, c, g, or t
  misc_feature (148)..(149): n is a, c, g, or t
  misc_feature (153)..(153): n is a, c, g, or t
  misc_feature (157)..(157): n is a, c, g, or t
  misc_feature (175)..(175): n is a, c, g, or t
  misc_feature (182)..(182): n is a, c, g, or t
  misc_feature (187)..(188): n is a, c, g, or t
  misc_feature (191)..(191): n is a, c, g, or t
  misc_feature (195)..(195): n is a, c, g, or t
  misc_feature (197)..(197): n is a, c, g, or t
  misc_feature (202)..(203): n is a, c, g, or t
  misc_feature (208)..(210): n is a, c, g, or t
  misc_feature (213)..(213): n is a, c, g, or t
  misc_feature (224)..(225): n is a, c, g, or t
  misc_feature (230)..(230): n is a, c, g, or t
  misc_feature (234)..(234): n is a, c, g, or t
  misc_feature (236)..(236): n is a, c, g, or t
  misc_feature (239)..(239): n is a, c, g, or t
  misc_feature (244)..(245): n is a, c, g, or t
  misc_feature (249)..(249): n is a, c, g, or t
  misc_feature (252)..(252): n is a, c, g, or t
  misc_feature (254)..(254): n is a, c, g, or t
  misc_feature (264)..(266): n is a, c, g, or t
  misc_feature (276)..(276): n is a, c, g, or t
  misc_feature (279)..(279): n is a, c, g, or t
  misc_feature (281)..(282): n is a, c, g, or t
  misc_feature (341)..(341): n is a, c, g, or t
  misc_feature (343)..(343): n is a, c, g, or t
  misc_feature (345)..(345): n is a, c, g, or t
  misc_feature (347)..(348): n is a, c, g, or t
  misc_feature (350)..(351): n is a, c, g, or t
  misc_feature (353)..(354): n is a, c, g, or t
  misc_feature (356)..(357): n is a, c, g, or t
  misc_feature (359)..(360): n is a, c, g, or t
  misc_feature (362)..(363): n is a, c, g, or t
  misc_feature (365)..(366): n is a, c, g, or t
  misc_feature (368)..(370): n is a, c, g, or t
  misc_feature (372)..(373): n is a, c, g, or t
  misc_feature (376)..(378): n is a, c, g, or t
  misc_feature (380)..(380): n is a, c, g, or t
  misc_feature (388)..(388): n is a, c, g, or t
  misc_feature (390)..(390): n is a, c, g, or t
  misc_feature (394)..(396): n is a, c, g, or t
  misc_feature (399)..(399): n is a, c, g, or t
  misc_feature (403)..(406): n is a, c, g, or t
  misc_feature (419)..(419): n is a, c, g, or t
  misc_feature (421)..(421): n is a, c, g, or t
  misc_feature (423)..(423): n is a, c, g, or t
  misc_feature (425)..(427): n is a, c, g, or t
  misc_feature (435)..(435): n is a, c, g, or t
annccnnnnaannccagaganncganngaacngagcaganaaggcagnccncanaanggcnnaganaccangngcnancgcncacnangcacccangacacaagancacagaagnacaggccnggaccanggcagagnanacacnggnngggnaaangaagaggagagacagagngggaagncggcnnagnggananggacnncaaannngangaacaagcaanncaaangagnancgngggcnngacnggnangaagacccgnnngcaaagcagnggncnnaagagagaaaagagagagagagagagagagagagagagagagagagaaagagagagagngngngnngnngnngnngnngnngnngnnnannggnnnanaacaagancnaccnnnggnaacnnnngaaagacccaccngnangnnnggcaagcnagc

SEQ ID NO: 264 - DNA, 862 bp, Artificial Sequence
  Description of Artificial Sequence: Note = Synthetic Construct
  misc_feature (384)..(384): n is a, c, g, or t
  misc_feature (400)..(400): n is a, c, g, or t
  misc_feature (424)..(424): n is a, c, g, or t
  misc_feature (431)..(431): n is a, c, g, or t
  misc_feature (457)..(457): n is a, c, g, or t
  misc_feature (538)..(538): n is a, c, g, or t
  misc_feature (548)..(548): n is a, c, g, or t
  misc_feature (587)..(587): n is a, c, g, or t
  misc_feature (602)..(602): n is a, c, g, or t
  misc_feature (620)..(620): n is a, c, g, or t
  misc_feature (634)..(634): n is a, c, g, or t
  misc_feature (646)..(646): n is a, c, g, or t
  misc_feature (654)..(654): n is a, c, g, or t
  misc_feature (663)..(664): n is a, c, g, or t
  misc_feature (717)..(717): n is a, c, g, or t
  misc_feature (721)..(721): n is a, c, g, or t
  misc_feature (738)..(738): n is a, c, g, or t
  misc_feature (751)..(751): n is a, c, g, or t
  misc_feature (761)..(761): n is a, c, g, or t
  misc_feature (767)..(767): n is a, c, g, or t
  misc_feature (794)..(794): n is a, c, g, or t
  misc_feature (797)..(797): n is a, c, g, or t
  misc_feature (807)..(807): n is a, c, g, or t
  misc_feature (813)..(813): n is a, c, g, or t
  misc_feature (816)..(817): n is a, c, g, or t
  misc_feature (833)..(833): n is a, c, g, or t
  misc_feature (851)..(851): n is a, c, g, or t
  misc_feature (860)..(860): n is a, c, g, or t
catttcacactttaattcaggcccgttccaattgggaaatgcttgtatgaagtgtgcttttcaatatatagtaacattttaaggaacggcttctaagtattatggtgaattctattgcaaaccctgcctcctaggtaaacactacaaaaaataatttcttagttatagtcagttttatcctggctagtaatttgtgagcattagtacacaaggaaagcagaggccgcacactttcttccaatagccatacaactataaagatggtgatggggagcattcacctggagtggggaccaagaataattatgcagtgttggaccatactaccagttctactttagcaaattaatgtttgggtaaaaagcaaggtcaataaaattgtcntttatatagtacaaangcaattattcaaagacctacaaanggggttngggatttaactcaatggtaaagcgcntcctaagaaacccaaaggcctgggttcggtccccaactcccggaaaaaaaaaagaacccaaagacctacaaaggtatgaanaaagtattancatattttgggaacagctattgatgactggcaataaaantttgaccatagatantttattgaattgataacntgaaatccatcaanttctgtgttaanggacaaantgctaagtnnagtttaaatgtgttgcacaaacagaagaatacttttatattaaatactgaacnttantttgttacataaggaanggagttaaatccnacataaaagngcctgntcacaaagggcccaaggattggaaggntanactttcctcnccggtnaanncccaatggtacggagnttcccaggcctagtaaantccctgggntc

SEQ ID NO: 265 - DNA, 875 bp, Artificial Sequence
  Description of Artificial Sequence: Note = Synthetic Construct
  misc_feature (13)..(13): n is a, c, g, or t
  misc_feature (515)..(515): n is a, c, g, or t
  misc_feature (525)..(525): n is a, c, g, or t
  misc_feature (573)..(573): n is a, c, g, or t
  misc_feature (614)..(614): n is a, c, g, or t
  misc_feature (617)..(617): n is a, c, g, or t
  misc_feature (623)..(623): n is a, c, g, or t
  misc_feature (626)..(626): n is a, c, g, or t
  misc_feature (650)..(650): n is a, c, g, or t
  misc_feature (652)..(652): n is a, c, g, or t
  misc_feature (668)..(668): n is a, c, g, or t
  misc_feature (674)..(674): n is a, c, g, or t
  misc_feature (693)..(693): n is a, c, g, or t
  misc_feature (698)..(698): n is a, c, g, or t
  misc_feature (714)..(714): n is a, c, g, or t
  misc_feature (717)..(717): n is a, c, g, or t
  misc_feature (747)..(747): n is a, c, g, or t
  misc_feature (754)..(754): n is a, c, g, or t
  misc_feature (764)..(764): n is a, c, g, or t
  misc_feature (766)..(767): n is a, c, g, or t
  misc_feature (786)..(786): n is a, c, g, or t
  misc_feature (798)..(798): n is a, c, g, or t
  misc_feature (824)..(824): n is a, c, g, or t
  misc_feature (831)..(831): n is a, c, g, or t
  misc_feature (859)..(859): n is a, c, g, or t
  misc_feature (862)..(862): n is a, c, g, or t
  misc_feature (870)..(870): n is a, c, g, or t
catttcacacttnatcaggcctctggaagagcaaacagtgttcttaaccactgagccatacctccagcccaatgtgtcattttttttttacagccatcctccatgatgagagagaggcagactcttctagccgctgcagctaggaaatgtctgtcatttctaacggttctaagttgcaatctccctgggtgagtgtgcacaggagagcctgtctgccgacatagcagcctcttccaagtaggtgcaatggtgcccttcactgtctatcctgggtctgtgggaccctaccaagagtagcagttaagtgggagggttctggagccgggccgtcagagtttgaattttgactcttggctttgtgacttgggacagctggcttagcctctctgggcctttcttttctctgacattgcagacagtaagcacaccctccccggggactttgtgtgagtacaaacgggaatataaactgtgaagtgcttgtagcacaacctggtacaaatgtttgggtttanctgtgctggncgcccaattccacgcctttcggagccagcagatagctcatcctctggnacaacccttctcaaaactgacgggatgggctcctgaagcanaantcctanaanggagcaacttcaagcagtaccaangnaagctgctccaatggncatgcntaaacccccggaagcaaanggganaggtttttcactaaanggnttcaaggaaaaaaaattaagggctgatgcnttgatgnccccagtacntnnggaaaaacaacccaactcnccgggttgtccncaaaaaactcaaaggagcctaaaggncctgaanttgggaatggcccgacaaaactgaaacnggngttcaaanttttt

SEQ ID NO: 266 - DNA, 424 bp, Artificial Sequence
  Description of Artificial Sequence: Note = Synthetic Construct
tttttttttttttttttaaagaacaattttttttaatttgttttacacggttaattaattttgtgtgtgccacagcatgcatgtagaaatcagaggacaacttgcacaagttagctctgtgtttccaccacatgggtcccagggacggaacctgggtcaggcttggccacgagggttgttacctgctgagccaccttgctggccctaaaatgcaatttttaaaaccaaatgttttaaacacaatataatcctacacatactagctggatatatacaccctaaggaatgccgtaagaaggtcatgtaaagtcctattttccataagtagaactgtatgtttctacaggaacagaaaactttacacattaagaacacggcagctcctaaccacctgaggtcctgaatctgggcctccgtcatttca

SEQ ID NO: 267 - DNA, 489 bp, Artificial Sequence
  Description of Artificial Sequence: Note = Synthetic Construct
  misc_feature (3)..(4): n is a, c, g, or t
  misc_feature (411)..(411): n is a, c, g, or t
  misc_feature (415)..(415): n is a, c, g, or t
  misc_feature (420)..(420): n is a, c, g, or t
  misc_feature (460)..(460): n is a, c, g, or t
  misc_feature (477)..(477): n is a, c, g, or t
  misc_feature (482)..(482): n is a, c, g, or t
atnncaacagaattcttttctagtgttcactgctaattggccagtctagccagtggccagatacctgggccaaaagctacctgggaaagtagcttcctctctcccattttgacctgaaggtgggtgtttgtgtgtgcaaggaggggcccaagggctttggtttagcagaaggggacttctcgaatccttttttgtcgtcatccttgtgacttagggcagctgtagctcgttctggaatttaggtacaggtgaacagggattgttttccttctgaaggcctttttttctttttcctggacctgactgctactgcctccagttaactcttccttatcttctctcctttggctcacacactggctcacttggtcccattttcagatcctgaagtgcgtttcctacctcagccancagnttggnctaggtccctgggggaaggcatcctttaaactttaacagngtttctcaattaaacantttantagtccc

SEQ ID NO: 268 - DNA, 761 bp, Artificial Sequence
  Description of Artificial Sequence: Note = Synthetic Construct
tttttttttaagccacagaaatataaaaatgtgctttcattttaatcccaagtgcagggatgtggggctgcttcagactgtccacagcagctgactatgatttgcctcatgctctagcagaggtgtgcttttgccagctgcagataggaccctcaggggtgggataggttgtttggtgtgggttgttggttgctgttggtggcagtttgttaagtagtcccacaaagaggaaacaacaagaagaaattaaatatctggatgacaaagatcaaacttgccccaagaaacttgatgcccctagtcagcaggaagtagtcccatgatacctttgccctctttcagacccctgactttattcagggatctctttccttcctccttctctatccttttttctctcttcactagtgctaggaggttgaaatggtagaagtaaagataaatcttttaaacaatttattttattttgttgtgtgtatgggtcttttgccagcctatatgtctttgtaccatgtgtgtgtgcatggctgagaagtctggaagagggcatcagttcccctgagtctagagttactgttttaaatagacatgagggtcctgggtattgaaccctggtccgctgcaaggctagccaatgctcttaactacagagctatctctccagccctgagaccattttttgacatgtggatttaaaggcatgtcctgtagctggcctttgatactttgtaggttctttattccacctttctccaccccct

SEQ ID NO: 269 - DNA, 911 bp, Artificial Sequence
  Description of Artificial Sequence: Note = Synthetic Construct
  misc_feature (10)..(10): n is a, c, g, or t
  misc_feature (22)..(22): n is a, c, g, or t
  misc_feature (32)..(33): n is a, c, g, or t
  misc_feature (37)..(38): n is a, c, g, or t
  misc_feature (40)..(41): n is a, c, g, or t
  misc_feature (49)..(49): n is a, c, g, or t
  misc_feature (52)..(52): n is a, c, g, or t
  misc_feature (74)..(74): n is a, c, g, or t
  misc_feature (85)..(86): n is a, c, g, or t
  misc_feature (91)..(91): n is a, c, g, or t
  misc_feature (93)..(93): n is a, c, g, or t
  misc_feature (103)..(103): n is a, c, g, or t
  misc_feature (106)..(106): n is a, c, g, or t
  misc_feature (118)..(118): n is a, c, g, or t
  misc_feature (120)..(120): n is a, c, g, or t
  misc_feature (126)..(126): n is a, c, g, or t
  misc_feature (132)..(132): n is a, c, g, or t
  misc_feature (138)..(138): n is a, c, g, or t
  misc_feature (143)..(143): n is a, c, g, or t
  misc_feature (149)..(149): n is a, c, g, or t
  misc_feature (152)..(152): n is a, c, g, or t
  misc_feature (160)..(160): n is a, c, g, or t
  misc_feature (168)..(168): n is a, c, g, or t
  misc_feature (174)..(174): n is a, c, g, or t
  misc_feature (179)..(180): n is a, c, g, or t
  misc_feature (182)..(183): n is a, c, g, or t
  misc_feature (188)..(189): n is a, c, g, or t
  misc_feature (191)..(191): n is a, c, g, or t
  misc_feature (193)..(193): n is a, c, g, or t
  misc_feature (198)..(198): n is a, c, g, or t
  misc_feature (202)..(202): n is a, c, g, or t
  misc_feature (221)..(222): n is a, c, g, or t
  misc_feature (224)..(225): n is a, c, g, or t
  misc_feature (228)..(228): n is a, c, g, or t
  misc_feature (230)..(230): n is a, c, g, or t
  misc_feature (232)..(232): n is a, c, g, or t
  misc_feature (240)..(240): n is a, c, g, or t
  misc_feature (243)..(243): n is a, c, g, or t
  misc_feature (251)..(251): n is a, c, g, or t
  misc_feature (253)..(254): n is a, c, g, or t
  misc_feature (257)..(257): n is a, c, g, or t
  misc_feature (261)..(263): n is a, c, g, or t
  misc_feature (266)..(266): n is a, c, g, or t
  misc_feature (274)..(274): n is a, c, g, or t
  misc_feature (276)..(277): n is a, c, g, or t
  misc_feature (280)..(280): n is a, c, g, or t
  misc_feature (293)..(293): n is a, c, g, or t
  misc_feature (304)..(305): n is a, c, g, or t
  misc_feature (308)..(308): n is a, c, g, or t
  misc_feature (310)..(310): n is a, c, g, or t
  misc_feature (312)..(312): n is a, c, g, or t
  misc_feature (315)..(315): n is a, c, g, or t
  misc_feature (319)..(319): n is a, c, g, or t
  misc_feature (325)..(325): n is a, c, g, or t
  misc_feature (327)..(328): n is a, c, g, or t
  misc_feature (336)..(336): n is a, c, g, or t
  misc_feature (340)..(340): n is a, c, g, or t
  misc_feature (342)..(342): n is a, c, g, or t
  misc_feature (351)..(351): n is a, c, g, or t
  misc_feature (355)..(356): n is a, c, g, or t
  misc_feature (359)..(359): n is a, c, g, or t
  misc_feature (362)..(362): n is a, c, g, or t
  misc_feature (365)..(365): n is a, c, g, or t
  misc_feature (375)..(375): n is a, c, g, or t
  misc_feature (378)..(378): n is a, c, g, or t
  misc_feature (380)..(380): n is a, c, g, or t
  misc_feature (382)..(382): n is a, c, g, or t
  misc_feature (389)..(390): n is a, c, g, or t
  misc_feature (396)..(396): n is a, c, g, or t
  misc_feature (399)..(399): n is a, c, g, or t
  misc_feature (409)..(409): n is a, c, g, or t
  misc_feature (428)..(428): n is a, c, g, or t
  misc_feature (430)..(430): n is a, c, g, or t
  misc_feature (440)..(440): n is a, c, g, or t
  misc_feature (447)..(447): n is a, c, g, or t
  misc_feature (449)..(449): n is a, c, g, or t
  misc_feature (452)..(452): n is a, c, g, or t
  misc_feature (454)..(454): n is a, c, g, or t
  misc_feature (456)..(457): n is a, c, g, or t
  misc_feature (468)..(468): n is a, c, g, or t
  misc_feature (470)..(470): n is a, c, g, or t
  misc_feature (472)..(472): n is a, c, g, or t
  misc_feature (484)..(484): n is a, c, g, or t
  misc_feature (487)..(488): n is a, c, g, or t
  misc_feature (506)..(507): n is a, c, g, or t
  misc_feature (509)..(509): n is a, c, g, or t
  misc_feature (518)..(518): n is a, c, g, or t
  misc_feature (521)..(521): n is a, c, g, or t
  misc_feature (527)..(527): n is a, c, g, or t
  misc_feature (529)..(529): n is a, c, g, or t
  misc_feature (546)..(548): n is a, c, g, or t
  misc_feature (555)..(555): n is a, c, g, or t
  misc_feature (560)..(560): n is a, c, g, or t
  misc_feature (583)..(583): n is a, c, g, or t
  misc_feature (586)..(586): n is a, c, g, or t
  misc_feature (588)..(589): n is a, c, g, or t
  misc_feature (591)..(595): n is a, c, g, or t
  misc_feature (604)..(604): n is a, c, g, or t
  misc_feature (606)..(606): n is a, c, g, or t
  misc_feature (608)..(608): n is a, c, g, or t
  misc_feature (612)..(612): n is a, c, g, or t
  misc_feature (619)..(621): n is a, c, g, or t
  misc_feature (626)..(626): n is a, c, g, or t
  misc_feature (628)..(628): n is a, c, g, or t
  misc_feature (631)..(632): n is a, c, g, or t
  misc_feature (638)..(638): n is a, c, g, or t
  misc_feature (644)..(644): n is a, c, g, or t
  misc_feature (656)..(656): n is a, c, g, or t
  misc_feature (658)..(660): n is a, c, g, or t
  misc_feature (664)..(667): n is a, c, g, or t
  misc_feature (675)..(675): n is a, c, g, or t
  misc_feature (679)..(679): n is a, c, g, or t
  misc_feature (682)..(683): n is a, c, g, or t
  misc_feature (686)..(688): n is a, c, g, or t
  misc_feature (691)..(693): n is a, c, g, or t
  misc_feature (697)..(697): n is a, c, g, or t
  misc_feature (701)..(701): n is a, c, g, or t
  misc_feature (706)..(706): n is a, c, g, or t
  misc_feature (710)..(710): n is a, c, g, or t
  misc_feature (714)..(715): n is a, c, g, or t
  misc_feature (719)..(719): n is a, c, g, or t
  misc_feature (724)..(724): n is a, c, g, or t
  misc_feature (728)..(728): n is a, c, g, or t
  misc_feature (731)..(732): n is a, c, g, or t
  misc_feature (735)..(735): n is a, c, g, or t
  misc_feature (744)..(747): n is a, c, g, or t
  misc_feature (754)..(756): n is a, c, g, or t
  misc_feature (760)..(762): n is a, c, g, or t
  misc_feature (769)..(769): n is a, c, g, or t
  misc_feature (773)..(773): n is a, c, g, or t
  misc_feature (775)..(776): n is a, c, g, or t
  misc_feature (779)..(780): n is a, c, g, or t
  misc_feature (783)..(784): n is a, c, g, or t
  misc_feature (797)..(797): n is a, c, g, or t
  misc_feature (801)..(802): n is a, c, g, or t
  misc_feature (807)..(807): n is a, c, g, or t
  misc_feature (820)..(820): n is a, c, g, or t
  misc_feature (822)..(823): n is a, c, g, or t
  misc_feature (829)..(831): n is a, c, g, or t
  misc_feature (840)..(840): n is a, c, g, or t
  misc_feature (850)..(850): n is a, c, g, or t
  misc_feature (853)..(853): n is a, c, g, or t
  misc_feature (858)..(860): n is a, c, g, or t
  misc_feature (865)..(866): n is a, c, g, or t
  misc_feature (873)..(873): n is a, c, g, or t
  misc_feature (877)..(877): n is a, c, g, or t
  misc_feature (883)..(885): n is a, c, g, or t
  misc_feature (887)..(887): n is a, c, g, or t
  misc_feature (899)..(901): n is a, c, g, or t
  misc_feature (906)..(907): n is a, c, g, or t
cattccattnaatctaaaattnctatcataannaatnntnncattttanaanaaaaacaaaatccacacaactnactttaaaatnntaaantntctattttanatncaaaaaaatatnantttctntttttnataaanctctnctcaancanacaaaaanctttattnttccantcaannannctcanntnanaacanaaanctacacctctcttcttttnnannaantnanctcacatncancacaccanannaancctnnncanaaaaacananntantatttcccaccancaccccttaanncantncntantaanactctntnnaaaattantcantnctcaaacanactnntanacnatnacattctcanaantntncttcacnntacttnatnctcacttctnctttcacttcttacattananccaatatttntctatanancantntnnttctcaatctntnantcccaacccttnttnnacaaaacccctttcctannantcccttaanaanaaaacncnatattacaatccctacnnntacaaantaccnttataaaatttcaacaaaaatanttntnntnnnnntcccccacntnanaacntttaaannntcccntnttnnaaaatnaaaacnccctccaaaccncnnntctnnnncccccctntttnttnnaannnaannncctncccnaaacncaancctnntccnccctntttnttnnaantaaaacatnnnnaaaaccnnntctnnnccccttntttntnnaannaannccccccaaaccantctnntcccncctttttcccccntnnactttnnntccaaaaantttaaacccnccnaatcnnnccccnntattccntccnaaacannnancttcttttcaannnaaccnncccc

SEQ ID NO: 270 - DNA, 883 bp, Artificial Sequence
  Description of Artificial Sequence: Note = Synthetic Construct
  misc_feature (10)..(10): n is a, c, g, or t
  misc_feature (19)..(19): n is a, c, g, or t
  misc_feature (50)..(50): n is a, c, g, or t
  misc_feature (67)..(67): n is a, c, g, or t
  misc_feature (499)..(499): n is a, c, g, or t
  misc_feature (526)..(526): n is a, c, g, or t
  misc_feature (610)..(610): n is a, c, g, or t
  misc_feature (639)..(639): n is a, c, g, or t
  misc_feature (662)..(662): n is a, c, g, or t
  misc_feature (689)..(689): n is a, c, g, or t
  misc_feature (693)..(693): n is a, c, g, or t
  misc_feature (725)..(725): n is a, c, g, or t
  misc_feature (734)..(734): n is a, c, g, or t
  misc_feature (780)..(780): n is a, c, g, or t
  misc_feature (788)..(788): n is a, c, g, or t
  misc_feature (808)..(808): n is a, c, g, or t
  misc_feature (824)..(824): n is a, c, g, or t
  misc_feature (844)..(844): n is a, c, g, or t
  misc_feature (851)..(851): n is a, c, g, or t
  misc_feature (854)..(854): n is a, c, g, or t
  misc_feature (874)..(874): n is a, c, g, or t
catttcacantttattctngccgctaaccttagtaaaagcattgttacangccgccatctttcttcntgctccgtaatccctgctcttcccattgcaagggagaggcagtggagggaagaatcccgctaagatcccgcccagcagttgcagagctcatctctgcttccagagctcttccacagggaggctctagttctctttaaatcctgactatgtcatcctatgacgtcccaagtctctgctagaatatagcattgatcgatccatttattgtaaagacagtcctgccattgtgcaccaacaggaaacaaatgttgttgtaatgattggagaagctctaagtctcccctgaagcgtgaacgtaagcatgtgtgagagtcaccctagactggtaagttggtggctcttagaatggccctgggaagacccttctggatttgcctgtagctgtatttcaggtaacgacccaccctgaatgtgggcagcaccaccccatantctggggtcctggactgggggacatanaaaagtggacaatgtgccagtatcgtgtctctgctttgtgactgtggacacagctggctagctgcttcgtgaccttggcaccantgacaagctgctctcaacatgcctcgtcntgccacagtgagatactgggccntcaaatggtgattcccaaataacctanctcntccttacattgctttggtcaagggttcatcanagctatganaaaggtatcctgtattctgggaaaggatgcacacactatcagcccntccctaanttggtgatccttggaacaanatttgccggaatccanacagacccacaggacaaagnttcccanttnacccaagtgttccaaaaatncgcttggcc

SEQ ID NO: 271 - DNA, 913 bp, Artificial Sequence
  Description of Artificial Sequence: Note = Synthetic Construct
ctagaatgagctcccttacataaaacaactccgtatgtgctgtcctgcttattcctgatggggtataaatcactcctttgcccagtgtattcccataatatacagtatccacccattaaccactttagtgataccaccgatttgtcatgggttctcagtgtctgtgttcaatgaagccgagtgttttacgccatcactgtcacatcgtcatctctctttgtctcatcatgtctgctttatgtgttggggtgtttgttttgtttttataattatttaattattcatgtaatgaattcactgtcgctgtcttcatacacacacaagaaggcatcagatcccattacggatgtcgtgaaccatcttttgttgccgggaatttaactctagtacccctgaaataaagtcttgctcttaaccacctccgaacaattctccatcctttgttttgttttgattcagggtcctgttatattccctgaatggcctaaacccgcttctgccttgttaatctggggtttaggtgttccttctttctctttgattttacatctcctcatcttaattttcccaaacttggaaaaattcgtccactacttacaaataatgaaaattctttaatgttttcccgcttttttcatggtttttaaggcctagattttttgaaaactttcccctggaatctgctggggattaacatattagctggtattgccttacctgggactctcttggaccattaactgatgttctttttcgcacacgtatgtgatcttaccctccctggaattcccttttctctaaaatttggttatttttgtttggttaaaaaaatggaattctccaaaaacttatgtggacctcttttacccccccccctccctatattctggggtggtcccttttcccgccccgg

SEQ ID NO: 272 - DNA, 864 bp, Artificial Sequence
  Description of Artificial Sequence: Note = Synthetic Construct
  misc_feature (17)..(17): n is a, c, g, or t
  misc_feature (66)..(66): n is a, c, g, or t
  misc_feature (134)..(134): n is a, c, g, or t
  misc_feature (497)..(497): n is a, c, g, or t
  misc_feature (547)..(547): n is a, c, g, or t
  misc_feature (657)..(657): n is a, c, g, or t
  misc_feature (709)..(709): n is a, c, g, or t
  misc_feature (714)..(714): n is a, c, g, or t
  misc_feature (716)..(716): n is a, c, g, or t
  misc_feature (722)..(722): n is a, c, g, or t
  misc_feature (780)..(780): n is a, c, g, or t
  misc_feature (796)..(796): n is a, c, g, or t
  misc_feature (805)..(805): n is a, c, g, or t
  misc_feature (819)..(819): n is a, c, g, or t
  misc_feature (831)..(831): n is a, c, g, or t
  misc_feature (840)..(840): n is a, c, g, or t
  misc_feature (853)..(853): n is a, c, g, or t
  misc_feature (856)..(856): n is a, c, g, or t
catttacatttaattcngccctccttagttggtaaagagtttaagcctgcgtgagggactccttcntcttctcacgtctccataattttctctgtccttcttggtacccggggtacccttggtacattggtcangacatccatgtatgggcaggggtgcacgtggcttcagtttccaaagttcttatctctcaccagactaactctaatgtggggaccacgtttcagtaggtattgaaaactcagcctacattctgatgaaagcgaccacgtcatgaaggagcttcttcccctgggttgagacatagtcaggagaactgttttgagcttggctgcaggcctgtggaggcacatgatgtccaccttcacacaatcacagggctttcctggtacacctcatcagtatcgttccggggatggcattcagagggaagtcaagattggctcaaaacacttttggctcacagattcaaaagatctttgaaatgtggccatgtncccagagcagtatgagtgacctcaaccttcactcatctgacaaatatgtncaaggtctattatgtgccagtgacagacccggggcaaggactgagacaatgacagacacctgagagctgtggcctggtcctcaagaaacctgctggtgggcccggaaaangtctctgtcaaagcaagctaagcacgtgctcccggggttcaagagttaacanacaangnccttanaattctaaaggacaatgtgttaatgaaaggaagggggggtgaaaggaaggaaggtgcnttaaacatgagaattnagcgaacanagccttgccttggnaaaactcattgnaaggccacnccttctatcacanaantcggggcc

SEQ ID NO: 273 - DNA, 863 bp, Artificial Sequence
  Description of Artificial Sequence: Note = Synthetic Construct
  misc_feature (14)..(14): n is a, c, g, or t
  misc_feature (19)..(19): n is a, c, g, or t
  misc_feature (29)..(29): n is a, c, g, or t
  misc_feature (31)..(31): n is a, c, g, or t
  misc_feature (35)..(35): n is a, c, g, or t
  misc_feature (38)..(39): n is a, c, g, or t
  misc_feature (46)..(46): n is a, c, g, or t
  misc_feature (53)..(53): n is a, c, g, or t
  misc_feature (108)..(108): n is a, c, g, or t
  misc_feature (124)..(124): n is a, c, g, or t
  misc_feature (145)..(145): n is a, c, g, or t
  misc_feature (153)..(153): n is a, c, g, or t
  misc_feature (200)..(200): n is a, c, g, or t
  misc_feature (205)..(205): n is a, c, g, or t
  misc_feature (279)..(279): n is a, c, g, or t
  misc_feature (283)..(283): n is a, c, g, or t
  misc_feature (336)..(336): n is a, c, g, or t
  misc_feature (342)..(342): n is a, c, g, or t
  misc_feature (353)..(353): n is a, c, g, or t
  misc_feature (356)..(356): n is a, c, g, or t
  misc_feature (412)..(412): n is a, c, g, or t
  misc_feature (441)..(441): n is a, c, g, or t
  misc_feature (474)..(474): n is a, c, g, or t
  misc_feature (481)..(481): n is a, c, g, or t
  misc_feature (513)..(514): n is a, c, g, or t
  misc_feature (516)..(517): n is a, c, g, or t
  misc_feature (524)..(525): n is a, c, g, or t
  misc_feature (527)..(527): n is a, c, g, or t
  misc_feature (530)..(530): n is a, c, g, or t
  misc_feature (536)..(536): n is a, c, g, or t
  misc_feature (544)..(544): n is a, c, g, or t
  misc_feature (555)..(555): n is a, c, g, or t
  misc_feature (571)..(571): n is a, c, g, or t
  misc_feature (584)..(584): n is a, c, g, or t
  misc_feature (627)..(627): n is a, c, g, or t
  misc_feature (636)..(636): n is a, c, g, or t
  misc_feature (655)..(655): n is a, c, g, or t
  misc_feature (661)..(661): n is a, c, g, or t
  misc_feature (665)..(665): n is a, c, g, or t
  misc_feature (670)..(670): n is a, c, g, or t
  misc_feature (697)..(697): n is a, c, g, or t
  misc_feature (711)..(711): n is a, c, g, or t
  misc_feature (730)..(730): n is a, c, g, or t
  misc_feature (733)..(733): n is a, c, g, or t
  misc_feature (754)..(754): n is a, c, g, or t
  misc_feature (766)..(766): n is a, c, g, or t
  misc_feature (784)..(784): n is a, c, g, or t
  misc_feature (786)..(786): n is a, c, g, or t
  misc_feature (800)..(800): n is a, c, g, or t
  misc_feature (807)..(807): n is a, c, g, or t
  misc_feature (812)..(812): n is a, c, g, or t
  misc_feature (819)..(819): n is a, c, g, or t
  misc_feature (826)..(826): n is a, c, g, or t
  misc_feature (840)..(840): n is a, c, g, or t
  misc_feature (842)..(842): n is a, c, g, or t
  misc_feature (845)..(845): n is a, c, g, or t
  misc_feature (851)..(851): n is a, c, g, or t
  misc_feature (854)..(854): n is a, c, g, or t
  misc_feature (860)..(860): n is a, c, g, or t
ttcacatttaatcngcccnacatctaatnanattncannggccccncagcagnaccaataaaaaacatcacgactaaatggagagaaacttgaagcaatcccactaanatcagggactagacanggctgctcactctctccctanctatttantttagtacccaaaagttctatgcagagcaattggacaatgaaaggangtcanagggatgcaaattggcaaggaagtcaaagtatcactatttgcaagaggatatgatagtatacttaagcgacccnaaanattctaccagagaactcctaaacctgaaaaactacttcagcaaagtggctggntataanattaactcaancanctcagtagccttcctttactcaaaggataaacaagctgataaagaacttaaggaancaacactcttcacaatagtcacaaatganataaaataccttggtgtgactctaaccaagcangtgaaanatctgtatgacaagaacttcaagtctctgaanntnnaaatggnnanagntctcanaagatggnaagacctccangctcatggattggtangattaatatagtnaaaatggtcatcttgcataaagcatctacagattcaatgcaancccatcaanttccactcaattctcatanagttanaaanagcanttgaatttcatttgggaaaaactgaanaccacgatattganaactattctcaacaattanagnaacttctatgggaatcatcanttctgactccanctgttccacatagcaatntnataatactgttggnatggtcnattanaggcagncttcatnggttagaatttgtngnccnatttgnccncccccnttg

SEQ ID NO: 274 - DNA, 889 bp, Artificial Sequence
  Description of Artificial Sequence: Note = Synthetic Construct
  misc_feature (15)..(15): n is a, c, g, or t
  misc_feature (50)..(50): n is a, c, g, or t
  misc_feature (594)..(594): n is a, c, g, or t
  misc_feature (626)..(626): n is a, c, g, or t
  misc_feature (642)..(642): n is a, c, g, or t
  misc_feature (672)..(672): n is a, c, g, or t
  misc_feature (724)..(724): n is a, c, g, or t
  misc_feature (769)..(769): n is a, c, g, or t
  misc_feature (771)..(772): n is a, c, g, or t
  misc_feature (774)..(774): n is a, c, g, or t
  misc_feature (784)..(784): n is a, c, g, or t
  misc_feature (786)..(786): n is a, c, g, or t
  misc_feature (826)..(826): n is a, c, g, or t
  misc_feature (838)..(838): n is a, c, g, or t
  misc_feature (864)..(864): n is a, c, g, or t
catttcacactttantcaggccccatggcgaaaccaaaaacttcatgatncccccaagcaaatccaaggcaactcagggagactggcctgtgagatggttcagtgcctaaaagatgattgctacctgaggactccagttcaagtcctgggacacacctggtaagttgtcccctgcacaaggtgcatgcccccatttccaaaataagagtgtaaattgtctgaagaaagaagaaaaaagacgtgtggttaaagggcatagtcaacaactaagttaatagctagcatctctcatgtagaattttgattccagagattttgttctagatcaggtattagtcctggtctggggctgaactggtagcatgcagaagccctgggtccctcaggacttaaggtcagttttgggttgtacatactgagatctaggccatcctaaagatgcatgaaactctattttaaaatagaagcctggtgtgacagcccatgtttgccaagactgttgtaaattcaaagttaatccgggctacgacatagtaatttcgagacgagattcagacacataagactgtctctaaataaataaatataagtcangtgtggcgaaatgcctatatacacagtgctanagaagacaaggagatnagagtttgctttgtgaaatcatcctttgcnttgtgagttccaagctaacctgggtcaaatgagaactgacccaaaacaaaantcaatgaaagccaagttggagtaactcacgaatgtcaacccagtntnnanactgaaaaangngcaattcaaggaaatggaggcaaatctgggctggcaaccncaaaattttaanaacttcctcctggacttggtggctangaagggttacaagaattgggggttc

SEQ ID NO: 275 - DNA, 1010 bp, Artificial Sequence
  Description of Artificial Sequence: Note = Synthetic Construct
  misc_feature (29)..(29): n is a, c, g, or t
  misc_feature (31)..(31): n is a, c, g, or t
  misc_feature (324)..(324): n is a, c, g, or t
  misc_feature (449)..(449): n is a, c, g, or t
  misc_feature (479)..(479): n is a, c, g, or t
  misc_feature (534)..(534): n is a, c, g, or t
  misc_feature (608)..(608): n is a, c, g, or t
  misc_feature (623)..(623): n is a, c, g, or t
  misc_feature (676)..(676): n is a, c, g, or t
  misc_feature (693)..(693): n is a, c, g, or t
  misc_feature (775)..(775): n is a, c, g, or t
  misc_feature (780)..(780): n is a, c, g, or t
  misc_feature (796)..(796): n is a, c, g, or t
  misc_feature (801)..(801): n is a, c, g, or t
  misc_feature (806)..(806): n is a, c, g, or t
  misc_feature (816)..(816): n is a, c, g, or t
  misc_feature (823)..(823): n is a, c, g, or t
  misc_feature (858)..(858): n is a, c, g, or t
  misc_feature (863)..(863): n is a, c, g, or t
  misc_feature (869)..(869): n is a, c, g, or t
  misc_feature (880)..(880): n is a, c, g, or t
  misc_feature (885)..(885): n is a, c, g, or t
  misc_feature (899)..(899): n is a, c, g, or t
  misc_feature (920)..(920): n is a, c, g, or t
  misc_feature (925)..(926): n is a, c, g, or t
  misc_feature (928)..(928): n is a, c, g, or t
  misc_feature (940)..(940): n is a, c, g, or t
  misc_feature (942)..(942): n is a, c, g, or t
  misc_feature (947)..(947): n is a, c, g, or t
  misc_feature (969)..(969): n is a, c, g, or t
  misc_feature (972)..(973): n is a, c, g, or t
  misc_feature (977)..(977): n is a, c, g, or t
  misc_feature (985)..(986): n is a, c, g, or t
  misc_feature (989)..(990): n is a, c, g, or t
  misc_feature (992)..(992): n is a, c, g, or t
  misc_feature (1005)..(1005): n is a, c, g, or t
  misc_feature (1008)..(1008): n is a, c, g, or t
cattcacacttaatcagcctttccacacncnaatgggagatatacatgtatgttaagtaaggatgccacagtaatggaatatctaagattgaacttacaaagagaaaatatttattttcactaatggttttagaggttccacttgtgatcaagctattctgttgctttgggtccacgtcaaacagcccatcaggtggtgaatattagaactaaaccatttatcctacagccaggaagaaaaaccaaagggaggctgaggaaacggctgtgggttcataaaactctttgaatcataccttgggtgattcaaatgctttttactangctctccttcatagtacctctctgtggacaaagacccagtcctttgaaaagcattgaaaactcaaaccataccactatcagtttcagctttaatataaattagctttctaagttcagctgaccancttttcactggaccttcactgatctcacanggaagatatattttcaacaattacaaagacattctgggttggactatgcattccnttgggccagattctacatcctttttttatgccaagaattttttagcgttcctgtaagattgtcagttcccctangaaatccataaagcnttaaatgccttctaatagccaatattttaatgagaaatgtatcactgatatcnccttgtattaaaggtantttgaggggattgcctggttggttggttggttggttggttggttggtaattggttggtttggcttggtttccgtcccatggnaatangatacttatgtcctanattanttacncaaatggccnttcaagnggaatccgggaaacaacaacttgggggaaaaaggngcccnagtttntaaaaacgttnagtgntttcccggttaccntttaaccccttatttggtaanttggnntnaaaaccttcccntnaaaanccccccttgggttgggaaaccnccnnggtntttccccnnttnncnaaagggttccccngtntc

SEQ ID NO: 276 - DNA, 998 bp, Artificial Sequence
  Description of Artificial Sequence: Note = Synthetic Construct
  misc_feature (10)..(10): n is a, c, g, or t
  misc_feature (18)..(18): n is a, c, g, or t
  misc_feature (21)..(21): n is a, c, g, or t
  misc_feature (24)..(24): n is a, c, g, or t
  misc_feature (37)..(37): n is a, c, g, or t
  misc_feature (417)..(417): n is a, c, g, or t
  misc_feature (420)..(420): n is a, c, g, or t
  misc_feature (453)..(453): n is a, c, g, or t
  misc_feature (455)..(455): n is a, c, g, or t
  misc_feature (458)..(458): n is a, c, g, or t
  misc_feature (464)..(464): n is a, c, g, or t
  misc_feature (482)..(482): n is a, c, g, or t
  misc_feature (620)..(620): n is a, c, g, or t
  misc_feature (623)..(623): n is a, c, g, or t
  misc_feature (675)..(675): n is a, c, g, or t
  misc_feature (725)..(725): n is a, c, g, or t
  misc_feature (727)..(727): n is a, c, g, or t
  misc_feature (739)..(739): n is a, c, g, or t
  misc_feature (750)..(750): n is a, c, g, or t
  misc_feature (764)..(764): n is a, c, g, or t
  misc_feature (766)..(766): n is a, c, g, or t
  misc_feature (793)..(794): n is a, c, g, or t
  misc_feature (814)..(814): n is a, c, g, or t
  misc_feature (821)..(821): n is a, c, g, or t
  misc_feature (825)..(825): n is a, c, g, or t
  misc_feature (827)..(827): n is a, c, g, or t
  misc_feature (838)..(838): n is a, c, g, or t
  misc_feature (841)..(842): n is a, c, g, or t
  misc_feature (845)..(845): n is a, c, g, or t
  misc_feature (849)..(849): n is a, c, g, or t
  misc_feature (861)..(861): n is a, c, g, or t
  misc_feature (863)..(863): n is a, c, g, or t
  misc_feature (867)..(867): n is a, c, g, or t
  misc_feature (882)..(883): n is a, c, g, or t
  misc_feature (887)..(888): n is a, c, g, or t
  misc_feature (892)..(892): n is a, c, g, or t
  misc_feature (901)..(901): n is a, c, g, or t
  misc_feature (903)..(903): n is a, c, g, or t
  misc_feature (918)..(919): n is a, c, g, or t
  misc_feature (929)..(931): n is a, c, g, or t
  misc_feature (936)..(936): n is a, c, g, or t
  misc_feature (943)..(944): n is a, c, g, or t
  misc_feature (948)..(949): n is a, c, g, or t
  misc_feature (957)..(957): n is a, c, g, or t
  misc_feature (961)..(961): n is a, c, g, or t
  misc_feature (964)..(965): n is a, c, g, or t
  misc_feature (970)..(971): n is a, c, g, or t
  misc_feature (979)..(979): n is a, c, g, or t
  misc_feature (985)..(986): n is a, c, g, or t
  misc_feature (992)..(993): n is a, c, g, or t
catttcacanttaattcngcnccnctgcaccaacaancttatttattttacaatgaagttcgaatcccagtgtccccctggagacaaggttcctggagtatgtccatgggcagtggcaaagcagctgccactcttcctaggtctctctgtggcctctctctccaaggcacatgaaatttaccacagcatatgcatttccttttctttttgagacagggtttctctgtgtagacttagctgtcctggaactcattctggagtttcttatcaggccagcctccaactcgtggagatccacttgtctctgcttcctgagtgccaccacccctggcctggcatatacacagtcaattccagaaaccgctttgctatcttggaactaatgaaggtagaggagaggacctctggttcatctgntgntgataactgagggacagatccccaagggaagantncantctggngaccaacatcatgttacntagaagcagtttccagcatcacaagtatcaacatcctgcttctaaggaagacctagaactgactgcattggagggaaagcaagatctgaataattgcattttcctgttttgccctaaagctctgtcttaacttcctantanaaccaaggtgcaaggaccaaactgggaagacaactgctgccacaacaagtcntggggacaaggaacatgctggcttccaactccaatttactgatcttacananagtaatgatgtntgggttctttncaacttggccttanantgcaagcaggttacttcaaggacttgnncggggtcaaggacacattgnaagaccncaancngttttttaaanggnnatnggangaattataaatnangggncccttggggggaaannttcnnccancaaagggtntnaaccctcctcctggnnttaacttggnnnaacanccaggtnntttnncccctttngtcngcnntcttnnaaaggggnggtttnngcaccnnccatc

SEQ ID NO: 277 - DNA, 1011 bp, Artificial Sequence
  Description of Artificial Sequence: Note = Synthetic Construct
  misc_feature (19)..(19): n is a, c, g, or t
  misc_feature (249)..(249): n is a, c, g, or t
  misc_feature (275)..(275): n is a, c, g, or t
  misc_feature (281)..(281): n is a, c, g, or t
  misc_feature (336)..(336): n is a, c, g, or t
  misc_feature (342)..(342): n is a, c, g, or t
  misc_feature (355)..(355): n is a, c, g, or t
  misc_feature (365)..(365): n is a, c, g, or t
  misc_feature (385)..(385): n is a, c, g, or t
  misc_feature (401)..(401): n is a, c, g, or t
  misc_feature (403)..(405): n is a, c, g, or t
  misc_feature (430)..(430): n is a, c, g, or t
  misc_feature (456)..(456): n is a, c, g, or t
  misc_feature (462)..(462): n is a, c, g, or t
  misc_feature (476)..(476): n is a, c, g, or t
  misc_feature (493)..(493): n is a, c, g, or t
  misc_feature (497)..(497): n is a, c, g, or t
  misc_feature (506)..(506): n is a, c, g, or t
  misc_feature (512)..(512): n is a, c, g, or t
  misc_feature (516)..(516): n is a, c, g, or t
  misc_feature (518)..(518): n is a, c, g, or t
  misc_feature (521)..(521): n is a, c, g, or t
  misc_feature (542)..(542): n is a, c, g, or t
  misc_feature (552)..(552): n is a, c, g, or t
  misc_feature (554)..(554): n is a, c, g, or t
  misc_feature (559)..(559): n is a, c, g, or t
  misc_feature (566)..(566): n is a, c, g, or t
  misc_feature (574)..(574): n is a, c, g, or t
  misc_feature (588)..(588): n is a, c, g, or t
  misc_feature (594)..(595): n is a, c, g, or t
  misc_feature (597)..(597): n is a, c, g, or t
  misc_feature (613)..(613): n is a, c, g, or t
  misc_feature (615)..(615): n is a, c, g, or t
  misc_feature (639)..(639): n is a, c, g, or t
  misc_feature (684)..(684): n is a, c, g, or t
  misc_feature (699)..(699): n is a, c, g, or t
  misc_feature (729)..(729): n is a, c, g, or t
  misc_feature (735)..(735): n is a, c, g, or t
  misc_feature (739)..(741): n is a, c, g, or t
  misc_feature (748)..(748): n is a, c, g, or t
  misc_feature (754)..(754): n is a, c, g, or t
  misc_feature (759)..(759): n is a, c, g, or t
  misc_feature (761)..(761): n is a, c, g, or t
  misc_feature (771)..(771): n is a, c, g, or t
  misc_feature (777)..(780): n is a, c, g, or t
  misc_feature (784)..(784): n is a, c, g, or t
  misc_feature (796)..(796): n is a, c, g, or t
  misc_feature (800)..(800): n is a, c, g, or t
  misc_feature (812)..(812): n is a, c, g, or t
  misc_feature (834)..(834): n is a, c, g, or t
  misc_feature (836)..(837): n is a, c, g, or t
  misc_feature (839)..(839): n is a, c, g, or t
  misc_feature (852)..(853): n is a, c, g, or t
  misc_feature (874)..(875): n is a, c, g, or t
  misc_feature (879)..(879): n is a, c, g, or t
  misc_feature (882)..(882): n is a, c, g, or t
  misc_feature (884)..(884): n is a, c, g, or t
  misc_feature (901)..(901): n is a, c, g, or t
  misc_feature (905)..(905): n is a, c, g, or t
  misc_feature (909)..(909): n is a, c, g, or t
  misc_feature (911)..(911): n is a, c, g, or t
  misc_feature (913)..(913): n is a, c, g, or t
  misc_feature (918)..(918): n is a, c, g, or t
  misc_feature (921)..(921): n is a, c, g, or t
  misc_feature (923)..(923): n is a, c, g, or t
  misc_feature (926)..(926): n is a, c, g, or t
  misc_feature (931)..(931): n is a, c, g, or t
  misc_feature (933)..(933): n is a, c, g, or t
  misc_feature (938)..(938): n is a, c, g, or t
  misc_feature (943)..(943): n is a, c, g, or t
  misc_feature (950)..(950): n is a, c, g, or t
  misc_feature (953)..(955): n is a, c, g, or t
  misc_feature (960)..(960): n is a, c, g, or t
  misc_feature (962)..(963): n is a, c, g, or t
  misc_feature (968)..(970): n is a, c, g, or t
  misc_feature (979)..(981): n is a, c, g, or t
  misc_feature (984)..(984): n is a, c, g, or t
  misc_feature (986)..(987): n is a, c, g, or t
  misc_feature (989)..(990): n is a, c, g, or t
  misc_feature (997)..(997): n is a, c, g, or t
  misc_feature (999)..(1000): n is a, c, g, or t
  misc_feature (1003)..(1004): n is a, c, g, or t
catttcaacttaatccccngcctttcctttaatctctagtctcaagattttttgctagatattatgaagggaagaagggagagagaagagggaattacttacccataagtaataagaggagtgtgttcttatatagccttatataattgtgtgtgtgtgtgtgtgtgtgtgtgtgtgtgtgtgtaagagggggtggaggtgaggagtgttgttatgatcatggagagagagtgagtattggaggggaangagggaggggcaaatgggttaactcntttgtnaccaaagccagccagtgtttaaatgttacctggaggggttggggatttagctcantggtanaacgcttgcctancaagcacaanggcctgggttcggtcctcanctctgaaaaaaacaantnnnacaaataaatgttatctggagtgantgctggccactggaggtatttgacangattanccattatctaccanaagagattttttttggnatantttgtccanatgaanttananatnctttccactccctgctccaangtcctccttnancccanggacaanatccttanaaacaagatcttangctggnnanatggctcaccggtaanancactgactgctctcctaaaggccngagttcaatccccaataaccacatggtggctcacaaccatctgtntgggatctgatcccnctccggtgtgcccgaaaaaataatgtgttncccatncctnnntaataancctttnatganangaagaaccangtcttnnnnaaanatctttaccgcntcangggcaggaggtntggaaccctggaagatcaaaancnnanacggcttccgcannaaccaccaccggaactcctcnngttncantnttaaagggcccccttgnggcnggangnanacccnttnancanttggncnttacnttggnaaaaaanccnnnggccncnnacccnnnaattttggnnnccnanntnnggccatncnnccnncccccct

SEQ ID NO: 278 - DNA, 425 bp, Artificial Sequence
  Description of Artificial Sequence: Note = Synthetic Construct
  misc_feature (21)..(21): n is a, c, g, or t
  misc_feature (395)..(395): n is a, c, g, or t
ggcccatttacttctaatcgnttctcatttgccctaccaagtgaaaaggacctcaagacctgaagacaaaatccttgaaaacttctctggagaatgtgcagagatcaccatggcaactgtcccgggccctgcctggcagggctccaaggcacacaaataacgccactggaatgtggtgcagggctccgggtggggtgactagaaaagctgccaattttccatgaaaaccaccggtgagaagcctcagcctcaggaaggtgtcagtagagagggctgggttctctctgagcaccaagggacaggctgtgcgcaagcatgcgcagaagcacactcaccggcctcctttggggcagggctgcctgaaatgaaccggcttcagttttgtgcagctcaanggcacaagggcagtgcccttgtcttgtacg

SEQ ID NO: 279 - DNA, 861 bp, Artificial Sequence
  Description of Artificial Sequence: Note = Synthetic Construct
  misc_feature (16)..(16): n is a, c, g, or t
  misc_feature (23)..(23): n is a, c, g, or t
  misc_feature (35)..(35): n is a, c, g, or t
  misc_feature (70)..(70): n is a, c, g, or t
  misc_feature (133)..(133): n is a, c, g, or t
  misc_feature (479)..(479): n is a, c, g, or t
  misc_feature (586)..(586): n is a, c, g, or t
  misc_feature (631)..(631): n is a, c, g, or t
  misc_feature (636)..(636): n is a, c, g, or t
  misc_feature (673)..(673): n is a, c, g, or t
  misc_feature (693)..(693): n is a, c, g, or t
  misc_feature (769)..(769): n is a, c, g, or t
  misc_feature (781)..(781): n is a, c, g, or t
  misc_feature (800)..(801): n is a, c, g, or t
  misc_feature (803)..(803): n is a, c, g, or t
  misc_feature (809)..(809): n is a, c, g, or t
  misc_feature (831)..(831): n is a, c, g, or t
  misc_feature (836)..(836): n is a, c, g, or t
ggccccatttcacatntaatcgntctgagagcgantatagggccagcaggcccgctgagtgccagtaaangccttcctcagcccatccgtcgtaatcgcaggcccagggatcctgcagtccttgagcattaanaataaaaccacattaggttgttttctcaattcctatgaaatgagtcagtaggtcaagcaactgacccactggagggaacaatccctgcagctacactccccacttccagtaactgggctccttctctctgccctgcacaaagtgctcccactaaccaggaggagcccatggggcctggcagacccagcttggatactgccagagagagtcagtctctgctggtggtagcattttcctgtgacagagggtactgttagaagtgccataggggtgaggcttccttagagttagcaaaacttctctgttaagaccatgtgtatcatttatctccttcaccccaaagaanggtcttggtgctaaaaataaacatagaaacccaataattacacctctgaaagctcccccagaaaaccacttccttctgcaaaattactttctcctcctcaaaagatntccatactcaaaagaccgagtggttggttattcaatcatccacantgttnaaacacacctcaaggtcctcctgctgtccggcagttncatccactgagctcaaggancaagaagtgtgttaaagctgccaacagccttttaaatccacaagtcaagttgctgaacaccttgggaaactaccanctactcacccanaagagagctggttcaagtnntnagtaancctctgcatcaagaaaccacanctacngccggtgaaaagtccgtaattccat

SEQ ID NO: 280 - DNA, 383 bp, Artificial Sequence
  Description of Artificial Sequence: Note = Synthetic Construct
  misc_feature (3)..(3): n is a, c, g, or t
  misc_feature (21)..(21): n is a, c, g, or t
  misc_feature (23)..(23): n is a, c, g, or t
ggncccgataaagatttgggnanagtagtagtggtcaaaagggacaaggtaataatggtaatatgcttttgtgtatgtgttcttttagagttatgttaaaatctagagaagcaaagtcgattctcatagatgcttttagtctttggaccctgactagagacagtttacaccctagacaagagagagaatggggttgagtaaaacagtcctcccgaactctccacagatgctttggcaaaagaaggaaatgagcttaaactttttggagctctcctgggaacagaaggaggtgggagacgtcttgcctccttgctggctcctattggagaagtgcttatttctggttctgggttttttaggtaggatgtctgggtccctttggt

SEQ ID NO: 281 - DNA, 1053 bp, Artificial Sequence
  Description of Artificial Sequence: Note = Synthetic Construct
  misc_feature (4)..(7): n is a, c, g, or t
  misc_feature (10)..(10): n is a, c, g, or t
  misc_feature (26)..(26): n is a, c, g, or t
  misc_feature (31)..(31): n is a, c, g, or t
  misc_feature (44)..(44): n is a, c, g, or t
  misc_feature (77)..(77): n is a, c, g, or t
  misc_feature (528)..(528): n is a, c, g, or t
  misc_feature (677)..(677): n is a, c, g, or t
  misc_feature (687)..(687): n is a, c, g, or t
  misc_feature (765)..(765): n is a, c, g, or t
  misc_feature (792)..(792): n is a, c, g, or t
  misc_feature (807)..(807): n is a, c, g, or t
  misc_feature (819)..(819): n is a, c, g, or t
  misc_feature (821)..(821): n is a, c, g, or t
  misc_feature (902)..(902): n is a, c, g, or t
  misc_feature (911)..(911): n is a, c, g, or t
  misc_feature (930)..(930): n is a, c, g, or t
  misc_feature (941)..(941): n is a, c, g, or t
  misc_feature (985)..(987): n is a, c, g, or t
  misc_feature (1016)..(1016): n is a, c, g, or t
  misc_feature (1024)..(1024): n is a, c, g, or t
  misc_feature (1032)..(1033): n is a, c, g, or t
  misc_feature (1037)..(1037): n is a, c, g, or t
  misc_feature (1040)..(1040): n is a, c, g, or t
  misc_feature (1050)..(1050): n is a, c, g, or t
tttnnnncanttcacactttattccngcccnatagcgaggtcanaaaggattaggaacagcctcacatatgcatccncaagtacacacagccatgcacacacactcatgctcacactcatgctcacactcatgctcacactcatgctcacactcatgttcacagtcttacagtcatacatacacccccacacacacaaacacacacatacacagagtcaggcatgtgacataaaaagtatggagtcaaccagttaacttttgtaaacattaatcttgatgagcttcttgccttttgtctgcaaagcaaggatggtcgtgatcagaaaggccagaattttttcgagaattaaatgaaatggtttaccaaaagcacttggtaagcatctggaaccggtgatcatcatacattgtaagaaaaagtttgagctaactaaataaatatttccgagtcttaataagggcgatatgcaaggacgctttttccctcccattcagcagttgaaggcagctgtatgtgcagaaggcanggtgccgctgtgcccacccataatgctagaagcgattgagtgaatcaggaaccatcaaaggatgattcacatcatatatttgcataatctcaaagtatctcttcacaagaatacctttctagctcaatggtaaagtataaagtttgtantggaagctantgtgtgaattgtgatctgcaggtttgcctgtatgcctgggctcaagaattctccctgctcgattctccaaatacctangactgtgtctgtcactgaacctgaggntaaacctaactttgncattaatttccncngtcatgtcaaatgcgaatcattggcaactttttgatccttctcccaaccacaagagggtccacggacctaagggactttanttcatgggnaaacaattatgttcccccnagggaaatatnggacttaaaaaaacctccaaaaagtgtatctgatcaacccatgnnncaatcatgttagggttttcaattaacggntttcactntgaaaaanntcgnttnaaaggtcccngcc

SEQ ID NO: 282 - DNA, 1030 bp, Artificial Sequence
  Description of Artificial Sequence: Note = Synthetic Construct
  misc_feature (28)..(28): n is a, c, g, or t
  misc_feature (35)..(35): n is a, c, g, or t
  misc_feature (39)..(39): n is a, c, g, or t
  misc_feature (52)..(52): n is a, c, g, or t
  misc_feature (586)..(586): n is a, c, g, or t
  misc_feature (588)..(588): n is a, c, g, or t
  misc_feature (603)..(603): n is a, c, g, or t
  misc_feature (608)..(608): n is a, c, g, or t
  misc_feature (637)..(637): n is a, c, g, or t
  misc_feature (661)..(661): n is a, c, g, or t
  misc_feature (667)..(667): n is a, c, g, or t
  misc_feature (691)..(691): n is a, c, g, or t
  misc_feature (696)..(696): n is a, c, g, or t
  misc_feature (700)..(700): n is a, c, g, or t
  misc_feature (733)..(733): n is a, c, g, or t
  misc_feature (746)..(746): n is a, c, g, or t
  misc_feature (760)..(760): n is a, c, g, or t
  misc_feature (772)..(772): n is a, c, g, or t
  misc_feature (799)..(800): n is a, c, g, or t
  misc_feature (805)..(806): n is a, c, g, or t
  misc_feature (817)..(817): n is a, c, g, or t
  misc_feature (855)..(855): n is a, c, g, or t
  misc_feature (862)..(862): n is a, c, g, or t
  misc_feature (874)..(874): n is a, c, g, or t
  misc_feature (882)..(882): n is a, c, g, or t
  misc_feature (923)..(923): n is a, c, g, or t
  misc_feature (926)..(926): n is a, c, g, or t
  misc_feature (929)..(929): n is a, c, g, or t
  misc_feature (941)..(941): n is a, c, g, or t
  misc_feature (947)..(947): n is a, c, g, or t
  misc_feature (949)..(949): n is a, c, g, or t
  misc_feature (954)..(954): n is a, c, g, or t
  misc_feature (957)..(957): n is a, c, g, or t
  misc_feature (964)..(964): n is a, c, g, or t
  misc_feature (967)..(967): n is a, c, g, or t
  misc_feature (971)..(971): n is a, c, g, or t
  misc_feature (980)..(981): n is a, c, g, or t
  misc_feature (985)..(985): n is a, c, g, or t
  misc_feature (996)..(996): n is a, c, g, or t
  misc_feature (1008)..(1009): n is a, c, g, or t
  misc_feature (1020)..(1020): n is a, c, g, or t
caattcacactttatcaggcccttccangtagcanaaancttgtaatatgcntacttgtaaagatttatcaaaatttgggtgtgccggatctgagtaacatggtgaattcaccatgttactgagattcagcacaccaaattttgataaatctttaaaagtacacatagtacaagagcaggctactgggaactaactgaattcagtaggttcccaataggattcgaatgtaataagcttgttattcaagatagagcaaagttttaacgcactgaaacactgcttctttgtgaattcagcatgtggctaagctaatgacagaagaaagatacttaagtgactgttgtccaaattgtcatccagtcttggtcaggtgaggattctgagtagagtggagaagcccccaaggtcttactaaagcattgggatttggttcacaagtggatttacacactgccttcgtctttactggtgattggatttgggaaactagcttccttactcctccagagccaactgcacaatggacatattagtactgatgttacagagtgaatatgaggaccaagtaggaacaaagggtgcaangnttgccaaaagggcangtaantggtggtcctgtcaatgtcataacttccngtaaagttttaggacttggaccgncaaganacatgatcattaatatacttgatnacaantggngatgaaaagacaaaaattggcacatcagaaganaatttacatgggnttccgcataactancaatcccggctnacctccaacccccaatccaatttcctnncaatnngggcatttccngaaaattcccctgggggttaaaggccattccggttttnggaccgnccagcccgggtngggaattncaaaaacttgccttaaaggtgaacccggaacccgaaaaaanatnttntaaaaaacctancttggnanggacnctnggggttnccnttcncaaagcacnngggnttttggaaatnttccccccccanntttcctccaanggcccccctt

SEQ ID NO: 283 - DNA, 1058 bp, Artificial Sequence
  Description of Artificial Sequence: Note = Synthetic Construct
  misc_feature (14)..(14): n is a, c, g, or t
  misc_feature (21)..(21): n is a, c, g, or t
  misc_feature (676)..(676): n is a, c, g, or t
  misc_feature (772)..(772): n is a, c, g, or t
  misc_feature (781)..(781): n is a, c, g, or t
  misc_feature (810)..(810): n is a, c, g, or t
  misc_feature (812)..(812): n is a, c, g, or t
  misc_feature (866)..(866): n is a, c, g, or t
  misc_feature (873)..(873): n is a, c, g, or t
  misc_feature (891)..(891): n is a, c, g, or t
  misc_feature (894)..(894): n is a, c, g, or t
  misc_feature (898)..(898): n is a, c, g, or t
  misc_feature (905)..(905): n is a, c, g, or t
  misc_feature (914)..(914): n is a, c, g, or t
  misc_feature (923)..(923): n is a, c, g, or t
  misc_feature (949)..(950): n is a, c, g, or t
  misc_feature (973)..(973): n is a, c, g, or t
  misc_feature (983)..(983): n is a, c, g, or t
  misc_feature (991)..(991): n is a, c, g, or t
  misc_feature (1005)..(1005): n is a, c, g, or t
  misc_feature (1009)..(1009): n is a, c, g, or t
  misc_feature (1021)..(1021): n is a, c, g, or t
  misc_feature (1024)..(1024): n is a, c, g, or t
  misc_feature (1036)..(1036): n is a, c, g, or t
  misc_feature (1046)..(1046): n is a, c, g, or t
cagttcacacattnattcttngcccaaatccacttgccaaagttgagatcacctgacctattctaccaaggaaaatctccatgtatcttctttggacacctagccttacagaggccagaatgaactctagaccaagccaagtattcacacagcccaatgtgacatgctaccacaaaatggagaattttccttcagtacactcaaatgacacaagctttttctcgatgtctttcttgtcattcactaccaggatgaaattaattttatcttctgaggaagcaatatacgataccacccaggaaaattcactttagatcttcgttctcatttcttggcaaacagaatttgagctgaatttctcttagaaaaatctgtccttcagaaacttaaattctgctgttccataacagaagtcagcaagtgactcaccctccagatacaggtatattacctccactcccatccacagagacttaattctagtcagcttcatgatagtgagccttcatccgtaaggagctgtatggtatgggaaggggatacagacagggccaggggtgtttttaaacggtaacccaaggaccacatccattaaaaacactgggactgtttgtgagagtgtatattcctgagcattgcctatcccttaaggtactacaaaatttgggagtgaggntcaacaaactattttaacatgcctctccaacaacaactcaagattcccgggcacagttgaaaagacccacctgtaggtttggcaaagctagctgangatcgttcncatgattgaacaaagatggattgacgcangntctccggcgcttgggtggaaaggtatccggtatgactgggcaaacaaaatccgntggtccnatgccgccgtgttccggnggnaacncaagggngcccggtcntttgtcaanacgaccgtccggtgcccgaatgaacnnaggacaggaaccgggaactggtnggcaaaaggngtccttgncacgtgcccacttntccnaaccggaagganggntgcatggccaanccggggaggntccgtaacccct

SEQ ID NO: 284 - DNA, 1077 bp, Artificial Sequence
  Description of Artificial Sequence: Note = Synthetic Construct
  misc_feature (4)..(6): n is a, c, g, or t
  misc_feature (11)..(11): n is a, c, g, or t
  misc_feature (19)..(19): n is a, c, g, or t
  misc_feature (28)..(29): n is a, c, g, or t
  misc_feature (46)..(46): n is a, c, g, or t
  misc_feature (59)..(59): n is a, c, g, or t
  misc_feature (76)..(76): n is a, c, g, or t
  misc_feature (420)..(420): n is a, c, g, or t
  misc_feature (639)..(639): n is a, c, g, or t
  misc_feature (709)..(709): n is a, c, g, or t
  misc_feature (711)..(711): n is a, c, g, or t
  misc_feature (753)..(753): n is a, c, g, or t
  misc_feature (812)..(812): n is a, c, g, or t
  misc_feature (815)..(815): n is a, c, g, or t
  misc_feature (825)..(825): n is a, c, g, or t
  misc_feature (846)..(846): n is a, c, g, or t
  misc_feature (855)..(855): n is a, c, g, or t
  misc_feature (864)..(864): n is a, c, g, or t
  misc_feature (867)..(867): n is a, c, g, or t
  misc_feature (909)..(909): n is a, c, g, or t
  misc_feature (914)..(914): n is a, c, g, or t
  misc_feature (928)..(928): n is a, c, g, or t
  misc_feature (934)..(934): n is a, c, g, or t
  misc_feature (939)..(939): n is a, c, g, or t
  misc_feature (961)..(961): n is a, c, g, or t
  misc_feature (976)..(976): n is a, c, g, or t
  misc_feature (988)..(988): n is a, c, g, or t
  misc_feature (990)..(990): n is a, c, g, or t
  misc_feature (994)..(994): n is a, c, g, or t
  misc_feature (996)..(996): n is a, c, g, or t
  misc_feature (1006)..(1006): n is a, c, g, or t
  misc_feature (1009)..(1009): n is a, c, g, or t
  misc_feature (1016)..(1016): n is a, c, g, or t
  misc_feature (1021)..(1021): n is a, c, g, or t
  misc_feature (1026)..(1026): n is a, c, g, or t
  misc_feature (1032)..(1032): n is a, c, g, or t
  misc_feature (1048)..(1048): n is a, c, g, or t
  misc_feature (1051)..(1051): n is a, c, g, or t
  misc_feature (1060)..(1060): n is a, c, g, or t
tttnnncattncacacttntatttcggnnccgaaaaatctgtcatnacagaaacttagnccctgctgttccataanaaaaagtcagcaagtgactcaccctccagatacaggtatattacctccactcccatccacagagacttaattctagtcagcttcatgatagtgagccttcatccgtaaggagctgtatggtatgggaaggggatacagacagggccaggggtgtttttaaacggtaacccagggaccacatccattaaaaacactggactgtttgtgagagtgtatattcctgagcattgcctatcccttaaggtactacaaaatttgggagtgaggctcagcaaactattttaacatgcctctccaccaacaactcaagattcccgggcacagttgaaagaccccacctgtangtttggcaagctagctgaggatcgtttcgcatgattgaacaagatggattgcacgcaggttctccggccgcttgggtggagaggctattcggctatgactgggcacaacagacaatcggctgctctgatgccgccgtgttccggctgtcagcgcaagggcgcccggttctttttgtcaagaccgacctgtccggtgccctgaatgaactgcaggacgangcaacgcggctatcgtggctggcacgacgggcgttccttgcgcagctgtgctcgacgttgtcactgaaancnggaaaggactggctgctattgggcaaattgccgggcaaggtntccctgtcatctcaacttgctcctgccgagaaatatccatcatggctgatcaatgccgnggntgcatacgcntgatccggtacctgccattcnacaacaagngaacatccntcnagcaacacttatcccggtggaacccggtcttgtccattaggntgatntgggccaaaagcanaagggntcccnccaaccgaatgttcccaagccnaaggggcccatgccnacgggaaggttncncctnanccatgggatnccngcttccnaatanaaggnggaaantggcctttttgggtcnacnaggtgcccnctggtttggggccctaa

SEQ ID NO: 285 - DNA, 1068 bp, Artificial Sequence
  Description of Artificial Sequence: Note = Synthetic Construct
  misc_feature (19)..(19): n is a, c, g, or t
  misc_feature (36)..(36): n is a, c, g, or t
  misc_feature (38)..(38): n is a, c, g, or t
  misc_feature (49)..(49): n is a, c, g, or t
  misc_feature (276)..(276): n is a, c, g, or t
  misc_feature (285)..(285): n is a, c, g, or t
  misc_feature (373)..(373): n is a, c, g, or t
  misc_feature (420)..(420): n is a, c, g, or t
  misc_feature (441)..(441): n is a, c, g, or t
  misc_feature (519)..(519): n is a, c, g, or t
  misc_feature (587)..(587): n is a, c, g, or t
  misc_feature (620)..(620): n is a, c, g, or t
  misc_feature (651)..(651): n is a, c, g, or t
  misc_feature (654)..(654): n is a, c, g, or t
  misc_feature (663)..(663): n is a, c, g, or t
  misc_feature (671)..(671): n is a, c, g, or t
  misc_feature (674)..(674): n is a, c, g, or t
  misc_feature (687)..(687): n is a, c, g, or t
  misc_feature (718)..(718): n is a, c, g, or t
  misc_feature (720)..(721): n is a, c, g, or t
  misc_feature (725)..(725): n is a, c, g, or t
  misc_feature (739)..(739): n is a, c, g, or t
  misc_feature (754)..(754): n is a, c, g, or t
  misc_feature (756)..(756): n is a, c, g, or t
  misc_feature (777)..(777): n is a, c, g, or t
  misc_feature (797)..(797): n is a, c, g, or t
  misc_feature (821)..(821): n is a, c, g, or t
  misc_feature (823)..(823): n is a, c, g, or t
  misc_feature (830)..(831): n is a, c, g, or t
  misc_feature (834)..(834): n is a, c, g, or t
  misc_feature (845)..(845): n is a, c, g, or t
  misc_feature (847)..(847): n is a, c, g, or t
  misc_feature (860)..(860): n is a, c, g, or t
  misc_feature (873)..(873): n is a, c, g, or t
  misc_feature (882)..(882): n is a, c, g, or t
  misc_feature (886)..(886): n is a, c, g, or t
  misc_feature (890)..(890): n is a, c, g, or t
  misc_feature (908)..(908): n is a, c, g, or t
  misc_feature (910)..(910): n is a, c, g, or t
  misc_feature (915)..(915): n is a, c, g, or t
  misc_feature (932)..(932): n is a, c, g, or t
  misc_feature (934)..(934): n is a, c, g, or t
  misc_feature (936)..(936): n is a, c, g, or t
  misc_feature (940)..(940): n is a, c, g, or t
  misc_feature (952)..(952): n is a, c, g, or t
  misc_feature (954)..(954): n is a, c, g, or t
  misc_feature (998)..(998): n is a, c, g, or t
  misc_feature (1028)..(1029): n is a, c, g, or t
  misc_feature (1035)..(1035): n is a, c, g, or t
  misc_feature (1038)..(1038): n is a, c, g, or t
  misc_feature (1053)..(1053): n is a, c, g, or t
  misc_feature (1059)..(1060): n is a, c, g, or t
  misc_feature (1066)..(1066): n is a, c, g, or t
cattcacactttatcttgnccctcatttacacacancncacacacacanacaaacacacgcacatcaaacttgtttatataagatgtatgtatagatacaaacatgtataaatatgtgtgatagtatatactgaagaacacacatacacacattttttttgtttgttttatgttcttgtaaaatctttaggaggtagaaaatctataggtgaatggaatacggtgctggtgctgggcttggcggtggtggtggcacggagagggggatgtttgcangatcggaangggttcccgtgggcaggttttattgagaaccagatgctcccggcagagccagaagcacctggcttggttctcgcacccagcttcccanggaccgacagtgggcgtcgcgagccaagatttcccagaaagcccccnttggccgtttaagtcgagcanaggccgtggcgggcggtcgtaatgccaccgtttctcaagacccttgtgtcgcctgctgcagtggcggatgtgaatcanttaagtaacgttggacaccggtaatcactccctgcccggattcctccgccttgaccctgccaaggcancgcggaaacagtgtccgattctgaaccgctganctgggggactgagctccacctcaatggctancanccttgtganagtgccancanatcctgggggcanccaaaactgaaaaccccacctgtagtttggnannctanctgaaggtttttcncatgattgaacaaananggtttcccccagtttccccgncccccttggttggaaagctnttccgctttactgggcacaacaananaatcggnngcnctgatcccccntnttccgggtttcancccaggggccccngtttttttntaanaccnaccttccggtgccctgantnaactncagaccaggaaccccgntntnctgngtggccaaaaangntttccttgccaattttcccaattttccctaaaccggaaggacgnccccattggccaaattccgggcaggttccnnaatccnctnccctccaaaatttcncagggnngatcangt

SEQ ID NO: 286 - DNA, 1066 bp, Artificial Sequence
  Description of Artificial Sequence: Note = Synthetic Construct
  misc_feature (26)..(26): n is a, c, g, or t
  misc_feature (37)..(37): n is a, c, g, or t
  misc_feature (52)..(52): n is a, c, g, or t
  misc_feature (55)..(55): n is a, c, g, or t
  misc_feature (75)..(75): n is a, c, g, or t
  misc_feature (532)..(532): n is a, c, g, or t
  misc_feature (539)..(539): n is a, c, g, or t
  misc_feature (684)..(684): n is a, c, g, or t
  misc_feature (711)..(711): n is a, c, g, or t
  misc_feature (743)..(743): n is a, c, g, or t
  misc_feature (780)..(780): n is a, c, g, or t
  misc_feature (799)..(799): n is a, c, g, or t
  misc_feature (808)..(808): n is a, c, g, or t
  misc_feature (814)..(814): n is a, c, g, or t
  misc_feature (819)..(819): n is a, c, g, or t
  misc_feature (830)..(830): n is a, c, g, or t
  misc_feature (832)..(833): n is a, c, g, or t
  misc_feature (836)..(836): n is a, c, g, or t
  misc_feature (839)..(839): n is a, c, g, or t
  misc_feature (843)..(843): n is a, c, g, or t
  misc_feature (878)..(878): n is a, c, g, or t
  misc_feature (889)..(889): n is a, c, g, or t
  misc_feature (894)..(894): n is a, c, g, or t
  misc_feature (902)..(902): n is a, c, g, or t
  misc_feature (906)..(906): n is a, c, g, or t
  misc_feature (918)..(918): n is a, c, g, or t
  misc_feature (924)..(925): n is a, c, g, or t
  misc_feature (929)..(929): n is a, c, g, or t
  misc_feature (944)..(944): n is a, c, g, or t
  misc_feature (946)..(948): n is a, c, g, or t
  misc_feature (960)..(960): n is a, c, g, or t
  misc_feature (965)..(967): n is a, c, g, or t
  misc_feature (969)..(969): n is a, c, g, or t
  misc_feature (973)..(973): n is a, c, g, or t
  misc_feature (988)..(988): n is a, c, g, or t
  misc_feature (992)..(993): n is a, c, g, or t
  misc_feature (996)..(997): n is a, c, g, or t
  misc_feature (1004)..(1007): n is a, c, g, or t
  misc_feature (1011)..(1011): n is a, c, g, or t
  misc_feature (1023)..(1023): n is a, c, g, or t
  misc_feature (1028)..(1028): n is a, c, g, or t
  misc_feature (1032)..(1032): n is a, c, g, or t
  misc_feature (1034)..(1034): n is a, c, g, or t
  misc_feature (1036)..(1038): n is a, c, g, or t
  misc_feature (1041)..(1041): n is a, c, g, or t
  misc_feature (1045)..(1046): n is a, c, g, or t
  misc_feature (1049)..(1049): n is a, c, g, or t
cagtccacacttctatcaggcttcantgggacggagngtccaaaaacgtcanggnccgagcaagaagactaacanctcctgggggtcctatatgtagtggaaagcaaggtttgggcccccaagtgtgggatctcagagccttggtactctctccatagactctctccatagatggccgttattctattggccgtttctcgggtgaagagcttaaaagcccagaggcaccaacaagctcggggatttaacagtattgggacctcgtgtcctctgtcctgccctgtctgcatgaggctctggcctgttgctgtccctgctctgttagtctgcctttttctctgccactcatcttaatccctgatcccagccctcctgatgtcagaggcaggaggatggctaaaatgaggcctttacctctgggcaattgagagtggacctgaactgcagagctggaattacagactcctggtggtctctgggctgtcacggaagcccagtcaggacattccttcctcctgttcgaaccctgatncctcggncttgcagatttggataatagttaactagaatttccccccataccttggtggaagtccaatagtgtgctcaagagcttttcaattcccaatgattttcacttctccctcctgccttctcatctcaacacatctctttactctccantcagccttccaacccaaccccaagcancaagccaagatacctggttcacctgaccacantgcgtgggtcaatttgctaatgttaaggagcccgaanatgtttacatcacttcaangtaaagggnaacaanccganaaagatttgcncnncanatnaggnactgagcaactcccagggctccctcttccaatcantgttccacaantcaanattgggtnaaanatttagccaagnattccnncccnttaacttcaaaatgngnnncccacggatttnttttnnntnattngccaaaaatttttgnttcnnaannccgtttnnnnccanaatttggaaccnaatcnaaancntnnnggnaaannttnaaaaaaaaaaggccctt

SEQ ID NO: 287 - DNA, 649 bp, Artificial Sequence
  Description of Artificial Sequence: Note = Synthetic Construct
  misc_feature (2)..(2): n is a, c, g, or t
  misc_feature (9)..(9): n is a, c, g, or t
  misc_feature (26)..(26): n is a, c, g, or t
  misc_feature (39)..(39): n is a, c, g, or t
  misc_feature (46)..(46): n is a, c, g, or t
  misc_feature (48)..(48): n is a, c, g, or t
  misc_feature (72)..(72): n is a, c, g, or t
  misc_feature (76)..(76): n is a, c, g, or t
  misc_feature (94)..(94): n is a, c, g, or t
  misc_feature (99)..(99): n is a, c, g, or t
  misc_feature (109)..(109): n is a, c, g, or t
  misc_feature (132)..(132): n is a, c, g, or t
  misc_feature (154)..(154): n is a, c, g, or t
  misc_feature (191)..(191): n is a, c, g, or t
  misc_feature (195)..(195): n is a, c, g, or t
  misc_feature (213)..(214): n is a, c, g, or t
  misc_feature (216)..(216): n is a, c, g, or t
  misc_feature (229)..(229): n is a, c, g, or t
  misc_feature (239)..(239): n is a, c, g, or t
  misc_feature (279)..(279): n is a, c, g, or t
  misc_feature (286)..(286): n is a, c, g, or t
  misc_feature (294)..(294): n is a, c, g, or t
  misc_feature (303)..(303): n is a, c, g, or t
  misc_feature (310)..(310): n is a, c, g, or t
  misc_feature (317)..(317): n is a, c, g, or t
  misc_feature (321)..(321): n is a, c, g, or t
  misc_feature (333)..(333): n is a, c, g, or t
  misc_feature (342)..(342): n is a, c, g, or t
  misc_feature (357)..(357): n is a, c, g, or t
  misc_feature (366)..(366): n is a, c, g, or t
  misc_feature (370)..(370): n is a, c, g, or t
  misc_feature (391)..(391): n is a, c, g, or t
  misc_feature (397)..(397): n is a, c, g, or t
  misc_feature (402)..(402): n is a, c, g, or t
  misc_feature (406)..(406): n is a, c, g, or t
  misc_feature (417)..(417): n is a, c, g, or t
  misc_feature (428)..(429): n is a, c, g, or t
  misc_feature (431)..(432): n is a, c, g, or t
  misc_feature (436)..(436): n is a, c, g, or t
  misc_feature (441)..(441): n is a, c, g, or t
  misc_feature (527)..(527): n is a, c, g, or t
  misc_feature (547)..(547): n is a, c, g, or t
  misc_feature (577)..(577): n is a, c, g, or t
  misc_feature (591)..(591): n is a, c, g, or t
  misc_feature (608)..(608): n is a, c, g, or t
  misc_feature (636)..(636): n is a, c, g, or t
  misc_feature (639)..(641): n is a, c, g, or t
anttacacnttatcaggcccttccantaggcaaactagnactaggngnactgttcgggattacgaaaatttncacnaacggcatcaaaatttcnaggcnaattcacacngatacagtgtttcatgttcgttnaaactttgctttatcttgaatnacaggcttactacatgcttatccgatggggaacctantganttccatgcccacaacgtnncnttgcaaccctcancgttccgccntgctcaagtcccctcacctcttgtagcctccgtcaatatncgaagantgatccangctgatccntgtaaantgcctgntcanttacgtttggtnggacacagnctgtaatcacagcanctacaaggncggngcaggacgatcgcaaatgtcnggaaancctgngctncaaagcaagantccatctcagnnannatanataancaagatgaagctgtcagcccatgactggcactcaacaaacgccttcaacacaaaagtctgcctggtggtgcactaataatccggancaatgttgcctgcaagaagnttcctgtgggccgccgagcaatctctgccntctggcactccaanctttccaaccctctgcngagctgggtgggggttgtatggggtggngtnnngggtgggg

SEQ ID NO: 288 - DNA, 987 bp, Artificial Sequence
  Description of Artificial Sequence: Note = Synthetic Construct
  misc_feature (4)..(4): n is a, c, g, or t
  misc_feature (8)..(8): n is a, c, g, or t
  misc_feature (21)..(22): n is a, c, g, or t
  misc_feature (34)..(34): n is a, c, g, or t
  misc_feature (38)..(39): n is a, c, g, or t
  misc_feature (42)..(42): n is a, c, g, or t
  misc_feature (44)..(44): n is a, c, g, or t
  misc_feature (56)..(56): n is a, c, g, or t
  misc_feature (69)..(69): n is a, c, g, or t
  misc_feature (77)..(77): n is a, c, g, or t
  misc_feature (104)..(105): n is a, c, g, or t
  misc_feature (109)..(109): n is a, c, g, or t
  misc_feature (131)..(131): n is a, c, g, or t
  misc_feature (135)..(135): n is a, c, g, or t
  misc_feature (137)..(137): n is a, c, g, or t
  misc_feature (139)..(139): n is a, c, g, or t
  misc_feature (157)..(157): n is a, c, g, or t
  misc_feature (164)..(164): n is a, c, g, or t
  misc_feature (169)..(169): n is a, c, g, or t
  misc_feature (173)..(173): n is a, c, g, or t
  misc_feature (178)..(178): n is a, c, g, or t
  misc_feature (181)..(181): n is a, c, g, or t
  misc_feature (189)..(189): n is a, c, g, or t
  misc_feature (210)..(210): n is a, c, g, or t
  misc_feature (214)..(215): n is a, c, g, or t
  misc_feature (222)..(222): n is a, c, g, or t
  misc_feature (239)..(239): n is a, c, g, or t
  misc_feature (245)..(245): n is a, c, g, or t
  misc_feature (250)..(250): n is a, c, g, or t
  misc_feature (252)..(252): n is a, c, g, or t
  misc_feature (259)..(259): n is a, c, g, or t
  misc_feature (261)..(261): n is a, c, g, or t
  misc_feature (263)..(263): n is a, c, g, or t
  misc_feature (270)..(270): n is a, c, g, or t
  misc_feature (273)..(273): n is a, c, g, or t
  misc_feature (278)..(278): n is a, c, g, or t
  misc_feature (285)..(285): n is a, c, g, or t
  misc_feature (303)..(303): n is a, c, g, or t
  misc_feature (310)..(312): n is a, c, g, or t
  misc_feature (325)..(325): n is a, c, g, or t
  misc_feature (331)..(331): n is a, c, g, or t
  misc_feature (333)..(333): n is a, c, g, or t
  misc_feature (335)..(335): n is a, c, g, or t
  misc_feature (342)..(342): n is a, c, g, or t
  misc_feature (344)..(345): n is a, c, g, or t
  misc_feature (351)..(351): n is a, c, g, or t
  misc_feature (358)..(358): n is a, c, g, or t
  misc_feature (373)..(373): n is a, c, g, or t
  misc_feature (380)..(380): n is a, c, g, or t
  misc_feature (384)..(384): n is a, c, g, or t
  misc_feature (392)..(392): n is a, c, g, or t
  misc_feature (403)..(403): n is a, c, g, or t
  misc_feature (420)..(420): n is a, c, g, or t
  misc_feature (426)..(426): n is a, c, g, or t
  misc_feature (435)..(435): n is a, c, g, or t
  misc_feature (439)..(439): n is a, c, g, or t
  misc_feature (441)..(442): n is a, c, g, or t
  misc_feature (446)..(447): n is a, c, g, or t
  misc_feature (449)..(450): n is a, c, g, or t
  misc_feature (453)..(454): n is a, c, g, or t
  misc_feature (456)..(456): n is a, c, g, or t
  misc_feature (459)..(459): n is a, c, g, or t
  misc_feature (465)..(465): n is a, c, g, or t
  misc_feature (469)..(469): n is a, c, g, or t
  misc_feature (471)..(471): n is a, c, g, or t
  misc_feature (474)..(474): n is a, c, g, or t
  misc_feature (477)..(477): n is a, c, g, or t
  misc_feature (481)..(482): n is a, c, g, or t
  misc_feature (484)..(486): n is a, c, g, or t
  misc_feature (488)..(489): n is a, c, g, or t
  misc_feature (491)..(491): n is a, c, g, or t
  misc_feature (494)..(494): n is a, c, g, or t
  misc_feature (497)..(497): n is a, c, g, or t
  misc_feature (502)..(502): n is a, c, g, or t
  misc_feature (517)..(518): n is a, c, g, or t
  misc_feature (525)..(525): n is a, c, g, or t
  misc_feature (533)..(534): n is a, c, g, or t
  misc_feature (538)..(539): n is a, c, g, or t
  misc_feature (549)..(549): n is a, c, g, or t
  misc_feature (558)..(558): n is a, c, g, or t
  misc_feature (569)..(571): n is a, c, g, or t
  misc_feature (573)..(573): n is a, c, g, or t
  misc_feature (586)..(586): n is a, c, g, or t
  misc_feature (610)..(610): n is a, c, g, or t
  misc_feature (612)..(612): n is a, c, g, or t
  misc_feature (615)..(615): n is a, c, g, or t
  misc_feature (618)..(619): n is a, c, g, or t
  misc_feature (628)..(628): n is a, c, g, or t
  misc_feature (642)..(642): n is a, c, g, or t
  misc_feature (645)..(646): n is a, c, g, or t
  misc_feature (651)..(655): n is a, c, g, or t
  misc_feature (657)..(657): n is a, c, g, or t
  misc_feature (662)..(663): n is a, c, g, or t
  misc_feature (665)..(666): n is a, c, g, or t
  misc_feature (679)..(679): n is a, c, g, or t
  misc_feature (704)..(704): n is a, c, g, or t
  misc_feature (722)..(722): n is a, c, g, or t
  misc_feature (726)..(726): n is a, c, g, or t
  misc_feature (738)..(739): n is a, c, g, or t
  misc_feature (753)..(753): n is a, c, g, or t
  misc_feature (755)..(755): n is a, c, g, or t
  misc_feature (771)..(771): n is a, c, g, or t
  misc_feature (787)..(787): n is a, c, g, or t
  misc_feature (805)..(805): n is a, c, g, or t
  misc_feature (812)..(812): n is a, c, g, or t
  misc_feature (816)..(816): n is a, c, g, or t
  misc_feature (820)..(820): n is a, c, g, or t
  misc_feature (840)..(840): n is a, c, g, or t
  misc_feature (863)..(864): n is a, c, g, or t
  misc_feature (869)..(869): n is a, c, g, or t
  misc_feature (871)..(871): n is a, c, g, or t
  misc_feature (877)..(877): n is a, c, g, or t
  misc_feature (879)..(879): n is a, c, g, or t
  misc_feature (882)..(882): n is a, c, g, or t
  misc_feature (886)..(886): n is a, c, g, or t
  misc_feature (891)..(892): n is a, c, g, or t
  misc_feature (895)..(896): n is a, c, g, or t
  misc_feature (908)..(908): n is a, c, g, or t
  misc_feature (911)..(911): n is a, c, g, or t
  misc_feature (922)..(922): n is a, c, g, or t
  misc_feature (944)..(944): n is a, c, g, or t
  misc_feature (962)..(962): n is a, c, g, or t
  misc_feature (969)..(971): n is a, c, g, or t
  misc_feature (973)..(973): n is a, c, g, or t
  misc_feature (976)..(976): n is a, c, g, or t
  misc_feature (980)..(980): n is a, c, g, or t
gggnaaangaaagaaaggggnnaaaagtgtgagnggtnnggngnggcctgtatacncctcaaaccgggntctgtccngtgtggggggctgaacacaacaacagnnctantctctctccattttgatctcgnggtncncnacagaaggggtgtgttgnggggttntccanctcnctccncanaggggtcncaattgtgtgtctcgtgtgtnacanngtgtatncgccatcagtgtgcgcntctctntccgngnttttccncncnctcgtgncanttcanctcaccntgggctctttcacatttngggaagnnnaggggtttttganaacacnantntgatttntnncaatanacaattntcacaacatgtgttngcgcatnacanttaccacnaggtctctatntgattataataataatnataatnataataatnattncnncaannannacnncnacngagggngatngnggnganggannannngnngnagnagnctctntggcaatctcacacnntttaccncactgggnnaganncccgtgttcnctgtggctntaaggggttannntngtgatgtgtgtcncatatttttcccaacagacactcncntgntgnnaggggcccntactcaatgggcantgnngcgtnnnnncncgggnntnnggcactcaccctntgaaacaaatgttttggtttgcacnttttttttttaaatgccnaagngtttttaaacanngggtaatccctggncncggaaacactttcagngggctttaaaaagggnaaaattttttaagggccntaggggnttgnttcnggggatcctgttacacaganaaggggggattcccttttttcannggaangnccattntnggntaanaggannccnntttccccacctnaantcgggggaacnggaccggtatgctaggccccanaacaggtgccggaaccanccgtttnnnanacntccnaaagggg

SEQ ID NO: 289 - DNA, 981 bp, Artificial Sequence
  Description of Artificial Sequence: Note = Synthetic Construct
  misc_feature (37)..(37): n is a, c, g, or t
  misc_feature (40)..(40): n is a, c, g, or t
  misc_feature (66)..(66): n is a, c, g, or t
  misc_feature (193)..(193): n is a, c, g, or t
  misc_feature (209)..(209): n is a, c, g, or t
  misc_feature (260)..(260): n is a, c, g, or t
  misc_feature (381)..(381): n is a, c, g, or t
  misc_feature (387)..(387): n is a, c, g, or t
  misc_feature (410)..(410): n is a, c, g, or t
  misc_feature (419)..(419): n is a, c, g, or t
  misc_feature (446)..(446): n is a, c, g, or t
  misc_feature (458)..(458): n is a, c, g, or t
  misc_feature (486)..(486): n is a, c, g, or t
  misc_feature (533)..(533): n is a, c, g, or t
  misc_feature (549)..(549): n is a, c, g, or t
  misc_feature (585)..(585): n is a, c, g, or t
  misc_feature (603)..(603): n is a, c, g, or t
  misc_feature (630)..(630): n is a, c, g, or t
  misc_feature (633)..(633): n is a, c, g, or t
  misc_feature (663)..(663): n is a, c, g, or t
  misc_feature (680)..(680): n is a, c, g, or t
  misc_feature (701)..(701): n is a, c, g, or t
  misc_feature (718)..(718): n is a, c, g, or t
  misc_feature (741)..(741): n is a, c, g, or t
  misc_feature (793)..(793): n is a, c, g, or t
  misc_feature (808)..(808): n is a, c, g, or t
  misc_feature (844)..(844): n is a, c, g, or t
  misc_feature (846)..(846): n is a, c, g, or t
  misc_feature (854)..(854): n is a, c, g, or t
  misc_feature (861)..(861): n is a, c, g, or t
  misc_feature (863)..(863): n is a, c, g, or t
  misc_feature (880)..(880): n is a, c, g, or t
  misc_feature (891)..(891): n is a, c, g, or t
  misc_feature (907)..(907): n is a, c, g, or t
  misc_feature (917)..(918): n is a, c, g, or t
  misc_feature (920)..(920): n is a, c, g, or t
  misc_feature (924)..(924): n is a, c, g, or t
  misc_feature (928)..(928): n is a, c, g, or t
  misc_feature (943)..(943): n is a, c, g, or t
  misc_feature (949)..(949): n is a, c, g, or t
  misc_feature (952)..(952): n is a, c, g, or t
  misc_feature (955)..(959): n is a, c, g, or t
  misc_feature (968)..(968): n is a, c, g, or t
  misc_feature (970)..(970): n is a, c, g, or t
attcacacagatttcggttggctccagtaggccgaantantaatgagtggactgtttgggatatanaaaaattttcacgaatggaatcaaaatttctaggcgaatttgctgaggggagcagggacaggctcccggtgtgtggctggaaagctcccagaatatcgttaaggccgctttctgaacaagtaggtanatatcagagaacgcangggtcggcaagatggcttagtataaaggtgctcgccctggacccagagtanaaggaaagaaccagactcccaaaagttgtattctgacattctcaaatatgctgtggcatgtacacattgtggcacatgtgtgaccacactcacatacacatgcacctattacacaattaanaacaanacaaaacaaacacagcttctganaaccttgancccacatacagcattaacatttatganaactggggctanaggggtcaaggagtcaagggatcagaanggctgggatcttggcacaaggcaatcacaagacatcccacataagcntggacaaggtccaagncactggattcccgcgtctacacatggagaataatanctagttgacaaaagccantttaagcaagacatctgcaatcctcancancatgacattgacttttaaatcacagccaanggacaacactcctaaanttctaaagacaaacggaatanttaaattctgcaacccncaaaaaaaaaaaatccacggcanaaattgggtttttttcccttaaaatttgaaagggaaatcattcccgaatctncaaatgtcccgaacnggggaattttaaaggaaaggaaaaaattcccttaantnaagggagngaaaaananaaaaggctaaaaagggnttaaggccatnggagttaggcaaacgnttaaccccgnngngagncccnacgttgcctttgganacccgnccnaannnnnggaaccttntncccccttggtt

SEQ ID NO: 290 - DNA, 721 bp, Artificial Sequence
  Description of Artificial Sequence: Note = Synthetic Construct
  misc_feature (3)..(3): n is a, c, g, or t
  misc_feature (18)..(18): n is a, c, g, or t
  misc_feature (20)..(20): n is a, c, g, or t
  misc_feature (22)..(22): n is a, c, g, or t
  misc_feature (38)..(38): n is a, c, g, or t
  misc_feature (43)..(44): n is a, c, g, or t
  misc_feature (51)..(51): n is a, c, g, or t
  misc_feature (53)..(53): n is a, c, g, or t
  misc_feature (60)..(60): n is a, c, g, or t
  misc_feature (68)..(68): n is a, c, g, or t
  misc_feature (74)..(74): n is a, c, g, or t
  misc_feature (76)..(77): n is a, c, g, or t
  misc_feature (91)..(91): n is a, c, g, or t
  misc_feature (112)..(112): n is a, c, g, or t
  misc_feature (115)..(115): n is a, c, g, or t
  misc_feature (122)..(122): n is a, c, g, or t
  misc_feature (127)..(127): n is a, c, g, or t
  misc_feature (136)..(136): n is a, c, g, or t
  misc_feature (153)..(154): n is a, c, g, or t
  misc_feature (161)..(161): n is a, c, g, or t
  misc_feature (167)..(167): n is a, c, g, or t
  misc_feature (177)..(177): n is a, c, g, or t
  misc_feature (181)..(181): n is a, c, g, or t
  misc_feature (185)..(185): n is a, c, g, or t
  misc_feature (203)..(203): n is a, c, g, or t
  misc_feature (206)..(206): n is a, c, g, or t
  misc_feature (221)..(221): n is a, c, g, or t
  misc_feature (232)..(232): n is a, c, g, or t
  misc_feature (235)..(235): n is a, c, g, or t
  misc_feature (237)..(237): n is a, c, g, or t
  misc_feature (248)..(248): n is a, c, g, or t
  misc_feature (256)..(257): n is a, c, g, or t
  misc_feature (260)..(260): n is a, c, g, or t
  misc_feature (266)..(267): n is a, c, g, or t
  misc_feature (271)..(271): n is a, c, g, or t
  misc_feature (279)..(281): n is a, c, g, or t
  misc_feature (284)..(285): n is a, c, g, or t
  misc_feature (287)..(287): n is a, c, g, or t
  misc_feature (295)..(295): n is a, c, g, or t
  misc_feature (297)..(298): n is a, c, g, or t
  misc_feature (300)..(300): n is a, c, g, or t
  misc_feature (306)..(306): n is a, c, g, or t
  misc_feature (317)..(317): n is a, c, g, or t
  misc_feature (330)..(330): n is a, c, g, or t
  misc_feature (336)..(336): n is a, c, g, or t
  misc_feature (341)..(341): n is a, c, g, or t
  misc_feature (360)..(363): n is a, c, g, or t
  misc_feature (365)..(365): n is a, c, g, or t
  misc_feature (368)..(368): n is a, c, g, or t
  misc_feature (373)..(373): n is a, c, g, or t
  misc_feature (383)..(383): n is a, c, g, or t
  misc_feature (389)..(389): n is a, c, g, or t
  misc_feature (408)..(408): n is a, c, g, or t
  misc_feature (410)..(410): n is a, c, g, or t
  misc_feature (423)..(423): n is a, c, g, or t
  misc_feature (430)..(430): n is a, c, g, or t
  misc_feature (459)..(459): n is a, c, g, or t
  misc_feature (493)..(493): n is a, c, g, or t
  misc_feature (524)..(524): n is a, c, g, or t
  misc_feature (560)..(560): n is a, c, g, or t
  misc_feature (566)..(566): n is a, c, g, or t
  misc_feature (576)..(576): n is a, c, g, or t
  misc_feature (592)..(592): n is a, c, g, or t
  misc_feature (597)..(597): n is a, c, g, or t
  misc_feature (599)..(599): n is a, c, g, or t
  misc_feature (605)..(605): n is a, c, g, or t
  misc_feature (609)..(609): n is a, c, g, or t
  misc_feature (640)..(640): n is a, c, g, or t
  misc_feature (644)..(645): n is a, c, g, or t
  misc_feature (651)..(651): n is a, c, g, or t
  misc_feature (658)..(658): n is a, c, g, or t
  misc_feature (660)..(660): n is a, c, g, or t
  misc_feature (665)..(665): n is a, c, g, or t
  misc_feature (685)..(686): n is a, c, g, or t
  misc_feature (688)..(688): n is a, c, g, or t
  misc_feature (711)..(711): n is a, c, g, or t
canttcacacagttttcnangnccacatagttaccaanctacnntcacagntncacgatncacaagtntccccnanncaagtcgcctaccntcttttgattccaatcgatcnaancttttcnagtgncctatgcantgtctcatattatagtnngggaggnactaantggtgactancacnagcntcatattaggttccaggnagnaaggaccttgtaatnatgtgtaattntgngnatttatcaaantatcgagnncanaatccnngtancatggtgnnntcnntnaccacatngnngntttcancactcaccgtnaccacatgctcangtctgntcacntcctgttacctccgtcaannnngncgngtggncgtgcccatngtctangatgcatgctcagtttcgntngagtccgacactnccagtcntcagaggactttcaatggcggtgcatgangatggagtatgtgtggacaacctgggctacatancaagactccatctcatagaacattaaggaancaaatgagctgtcagccaatgactggaaccaagcanacgccntcaacaaaanaatcctgcttgggggngaacnantatccnggancaatgtggctgcaggaaggctcctgtgggcnccgnncaatcnctgcctncnggaanccagcctttcagccctccgnngnactgggtgggggttttatgggtnggttggggtt

SEQ ID NO: 291 - DNA, 799 bp, Artificial Sequence
  Description of Artificial Sequence: Note = Synthetic Construct
  misc_feature (27)..(27): n is a, c, g, or t
  misc_feature (108)..(108): n is a, c, g, or t
  misc_feature (206)..(206): n is a, c, g, or t
  misc_feature (239)..(239): n is a, c, g, or t
  misc_feature (245)..(245): n is a, c, g, or t
  misc_feature (248)..(248): n is a, c, g, or t
  misc_feature (295)..(295): n is a, c, g, or t
  misc_feature (322)..(322): n is a, c, g, or t
  misc_feature (343)..(343): n is a, c, g, or t
  misc_feature (346)..(346): n is a, c, g, or t
  misc_feature (356)..(356): n is a, c, g, or t
  misc_feature (461)..(461): n is a, c, g, or t
  misc_feature (484)..(484): n is a, c, g, or t
  misc_feature (486)..(486): n is a, c, g, or t
  misc_feature (511)..(511): n is a, c, g, or t
  misc_feature (539)..(539): n is a, c, g, or t
  misc_feature (568)..(568): n is a, c, g, or t
  misc_feature (571)..(571): n is a, c, g, or t
  misc_feature (595)..(596): n is a, c, g, or t
  misc_feature (599)..(599): n is a, c, g, or t
  misc_feature (609)..(609): n is a, c, g, or t
  misc_feature (618)..(618): n is a, c, g, or t
  misc_feature (622)..(622): n is a, c, g, or t
  misc_feature (627)..(627): n is a, c, g, or t
  misc_feature (631)..(631): n is a, c, g, or t
  misc_feature (635)..(635): n is a, c, g, or t
  misc_feature (653)..(654): n is a, c, g, or t
  misc_feature (661)..(661): n is a, c, g, or t
  misc_feature (672)..(673): n is a, c, g, or t
  misc_feature (675)..(675): n is a, c, g, or t
  misc_feature (678)..(678): n is a, c, g, or t
  misc_feature (682)..(682): n is a, c, g, or t
  misc_feature (689)..(689): n is a, c, g, or t
  misc_feature (697)..(698): n is a, c, g, or t
  misc_feature (701)..(701): n is a, c, g, or t
  misc_feature (708)..(708): n is a, c, g, or t
  misc_feature (711)..(711): n is a, c, g, or t
  misc_feature (721)..(721): n is a, c, g, or t
  misc_feature (723)..(723): n is a, c, g, or t
  misc_feature (735)..(735): n is a, c, g, or t
  misc_feature (737)..(737): n is a, c, g, or t
  misc_feature (740)..(740): n is a, c, g, or t
  misc_feature (742)..(742): n is a, c, g, or t
  misc_feature (747)..(747): n is a, c, g, or t
  misc_feature (749)..(749): n is a, c, g, or t
  misc_feature (761)..(761): n is a, c, g, or t
cattccattgattctagggccgggtcngcctgctcatcactcccgagttagagtgagcgcgttccgccctccgccatcgctcccggccggattctcccctcagacacncagagaagacgctcgggaagtgtctgcgtgcacccctggagcgccgcgcctggcgtgggacagctgaagggaggggaaggctgcgggaccaggctganggagaacaggtggcgcggggcggctgacgtgtntgtgtncanggcaagaagacagctgggtggggcggggatccacctggccaaggtcnggtgggagaagaaaagatgcacctganaaaggcggttccttgggttcnaanggaaaagganctgcaagtccaccgcgtgagctccggaagaaggaaggcggtgctccaaactctcacttctctccaaaagaaaacaaacgctgcccttgcacctattggagatgtncatttgcaccctgggaaaaaatnanaacccacagtatcctcaggaaatcnctctgcacactaatctctctgcttttcnaggttgcaatatctgggtgccccaagaanggncctgaagatcccgtccccggaatnnccnccctggggcntcccttccnccanatctnccantctnaaatccaacccgaccctnntttcaantgtcccgggcnncnggnaaanaccgttntttcggtnnccnccggganaanttttccccancncctggttccccntnccntnaacgncncccaaactgggntgtcgggggggttttttttcccccctcctaagggcctc

SEQ ID NO: 292 - DNA, 1025 bp, Artificial Sequence
  Description of Artificial Sequence: Note = Synthetic Construct
  misc_feature (4)..(4): n is a, c, g, or t
  misc_feature (7)..(7): n is a, c, g, or t
  misc_feature (20)..(20): n is a, c, g, or t
  misc_feature (26)..(26): n is a, c, g, or t
  misc_feature (37)..(37): n is a, c, g, or t
  misc_feature (43)..(43): n is a, c, g, or t
  misc_feature (46)..(46): n is a, c, g, or t
  misc_feature (51)..(51): n is a, c, g, or t
  misc_feature (54)..(54): n is a, c, g, or t
  misc_feature (64)..(64): n is a, c, g, or t
  misc_feature (66)..(66): n is a, c, g, or t
  misc_feature (71)..(71): n is a, c, g, or t
  misc_feature (73)..(73): n is a, c, g, or t
  misc_feature (77)..(77): n is a, c, g, or t
  misc_feature (82)..(83): n is a, c, g, or t
  misc_feature (85)..(85): n is a, c, g, or t
  misc_feature (91)..(92): n is a, c, g, or t
  misc_feature (97)..(98): n is a, c, g, or t
  misc_feature (102)..(102): n is a, c, g, or t
  misc_feature (121)..(121): n is a, c, g, or t
  misc_feature (126)..(126): n is a, c, g, or t
  misc_feature (129)..(129): n is a, c, g, or t
  misc_feature (133)..(133): n is a, c, g, or t
  misc_feature (148)..(148): n is a, c, g, or t
  misc_feature (161)..(161): n is a, c, g, or t
  misc_feature (163)..(163): n is a, c, g, or t
  misc_feature (172)..(172): n is a, c, g, or t
  misc_feature (182)..(182): n is a, c, g, or t
  misc_feature (201)..(201): n is a, c, g, or t
  misc_feature (204)..(205): n is a, c, g, or t
  misc_feature (211)..(211): n is a, c, g, or t
  misc_feature (215)..(215): n is a, c, g, or t
  misc_feature (227)..(228): n is a, c, g, or t
  misc_feature (236)..(236): n is a, c, g, or t
  misc_feature (240)..(240): n is a, c, g, or t
  misc_feature (249)..(249): n is a, c, g, or t
  misc_feature (252)..(252): n is a, c, g, or t
  misc_feature (260)..(260): n is a, c, g, or t
  misc_feature (266)..(267): n is a, c, g, or t
  misc_feature (278)..(279): n is a, c, g, or t
  misc_feature (287)..(288): n is a, c, g, or t
  misc_feature (295)..(295): n is a, c, g, or t
  misc_feature (300)..(301): n is a, c, g, or t
  misc_feature (304)..(304): n is a, c, g, or t
  misc_feature (314)..(314): n is a, c, g, or t
  misc_feature (322)..(322): n is a, c, g, or t
  misc_feature (334)..(334): n is a, c, g, or t
  misc_feature (342)..(342): n is a, c, g, or t
  misc_feature (361)..(361): n is a, c, g, or t
  misc_feature (376)..(376): n is a, c, g, or t
  misc_feature (386)..(386): n is a, c, g, or t
  misc_feature (401)..(401): n is a, c, g, or t
  misc_feature (404)..(404): n is a, c, g, or t
  misc_feature (406)..(406): n is a, c, g, or t
  misc_feature (431)..(431): n is a, c, g, or t
  misc_feature (470)..(470): n is a, c, g, or t
  misc_feature (508)..(508): n is a, c, g, or t
  misc_feature (513)..(513): n is a, c, g, or t
  misc_feature (515)..(515): n is a, c, g, or t
  misc_feature (523)..(523): n is a, c, g, or t
  misc_feature (548)..(548): n is a, c, g, or t
  misc_feature (660)..(660): n is a, c, g, or t
  misc_feature (718)..(718): n is a, c, g, or t
  misc_feature (722)..(722): n is a, c, g, or t
  misc_feature (740)..(740): n is a, c, g, or t
  misc_feature (754)..(754): n is a, c, g, or t
  misc_feature (767)..(767): n is a, c, g, or t
  misc_feature (794)..(794): n is a, c, g, or t
  misc_feature (797)..(797): n is a, c, g, or t
  misc_feature (942)..(942): n is a, c, g, or t
  misc_feature (946)..(946): n is a, c, g, or t
  misc_feature (948)..(948): n is a, c, g, or t
  misc_feature (976)..(976): n is a, c, g, or t
  misc_feature (1000)..(1000): n is a, c, g, or t
  misc_feature (1020)..(1020): n is a, c, g, or t
  misc_feature (1022)..(1022): n is a, c, g, or t
  misc_feature (1024)..(1024): n is a, c, g, or t
aagnccnttttcacgggcgnattttnttcttccgccncctgtnagntgcgncantttctgaatngntccgngntaanttccnncnaggganntaagnnccantttcacgaactcctttgangcctncangcgntggaaagtcggattncctaccctgaacnantttggatgnccgttttttntaatagcaatgttataccngtnnttcatncctngtatctgggacnnattccatntctntaatccggnccnaagttatntcaaanntgtgaatgggnntttgattnngaggganccttnntancgcttggagntggttgcnaagttcccgttnatttatcngattgaaagggtatcaganttatattgtgtaacnccggggctantccataaatttatcntcntnttgtataggaatgtcttggtgtggngtactgttggaacttggatgattaagtgcttagagtctnttctggaggacatccaggttttgctctgagcacattcntaacntntctgtatntgtgtggaaaaagtacaagcatttnccaagagaaaagcaggtgatgggtcataagaatgataatacaaaaatcctgtgagtacttaacactctgctggtacagaactaacaattgaaactacagagacacactttantacaatgtgaagaaaagtcacagcaacaaacaactcaaaatctaaaagttgagaattntatntggaaaatctacagggcnttatataatacttncaattactttgtnttagtgatatgtgaaaatgaacacatnctngtggttaaagtcagtgggacctttttcaaaagtatagttcatattgtttgtatgagttttgaagacttaatgatgcccccatcacaatggaatgtagacctataatttccctgaggatcattgcagattttccccaggcatttcnttcntntgttcccaagccatggccacgtttgacntgatgtttgggcccccagggcgtntgggaatggatcgggcctgntnana

SEQ ID NO: 293 - DNA, 952 bp, Artificial Sequence
  Description of Artificial Sequence: Note = Synthetic Construct
  misc_feature (10)..(10): n is a, c, g, or t
  misc_feature (39)..(39): n is a, c, g, or t
  misc_feature (50)..(50): n is a, c, g, or t
  misc_feature (66)..(66): n is a, c, g, or t
  misc_feature (113)..(113): n is a, c, g, or t
  misc_feature (157)..(157): n is a, c, g, or t
  misc_feature (189)..(189): n is a, c, g, or t
  misc_feature (193)..(193): n is a, c, g, or t
  misc_feature (200)..(200): n is a, c, g, or t
  misc_feature (202)..(202): n is a, c, g, or t
  misc_feature (209)..(209): n is a, c, g, or t
  misc_feature (215)..(215): n is a, c, g, or t
  misc_feature (249)..(249): n is a, c, g, or t
  misc_feature (255)..(255): n is a, c, g, or t
  misc_feature (294)..(295): n is a, c, g, or t
  misc_feature (355)..(355): n is a, c, g, or t
  misc_feature (378)..(378): n is a, c, g, or t
  misc_feature (380)..(380): n is a, c, g, or t
  misc_feature (386)..(386): n is a, c, g, or t
  misc_feature (395)..(395): n is a, c, g, or t
  misc_feature (426)..(426): n is a, c, g, or t
  misc_feature (445)..(445): n is a, c, g, or t
  misc_feature (481)..(481): n is a, c, g, or t
  misc_feature (484)..(484): n is a, c, g, or t
  misc_feature (498)..(498): n is a, c, g, or t
  misc_feature (521)..(521): n is a, c, g, or t
  misc_feature (538)..(538): n is a, c, g, or t
  misc_feature (546)..(546): n is a, c, g, or t
  misc_feature (548)..(548): n is a, c, g, or t
  misc_feature (568)..(568): n is a, c, g, or t
  misc_feature (575)..(575): n is a, c, g, or t
  misc_feature (580)..(580): n is a, c, g, or t
  misc_feature (582)..(582): n is a, c, g, or t
  misc_feature (585)..(586): n is a, c, g, or t
  misc_feature (594)..(594): n is a, c, g, or t
  misc_feature (596)..(596): n is a, c, g, or t
  misc_feature (598)..(598): n is a, c, g, or t
  misc_feature (625)..(625): n is a, c, g, or t
  misc_feature (633)..(633): n is a, c, g, or t
  misc_feature (644)..(644): n is a, c, g, or t
  misc_feature (653)..(653): n is a, c, g, or t
  misc_feature (657)..(657): n is a, c, g, or t
  misc_feature (682)..(682): n is a, c, g, or t
  misc_feature (691)..(691): n is a, c, g, or t
  misc_feature (694)..(694): n is a, c, g, or t
  misc_feature (696)..(696): n is a, c, g, or t
  misc_feature (700)..(700): n is a, c, g, or t
  misc_feature (722)..(722): n is a, c, g, or t
  misc_feature (728)..(728): n is a, c, g, or t
  misc_feature (730)..(730): n is a, c, g, or t
  misc_feature (735)..(735): n is a, c, g, or t
  misc_feature (760)..(760): n is a, c, g, or t
  misc_feature (774)..(774): n is a, c, g, or t
  misc_feature (787)..(787): n is a, c, g, or t
  misc_feature (794)..(794): n is a, c, g, or t
  misc_feature (805)..(805): n is a, c, g, or t
  misc_feature (808)..(809): n is a, c, g, or t
  misc_feature (818)..(818): n is a, c, g, or t
  misc_feature (820)..(820): n is a, c, g, or t
  misc_feature (822)..(822): n is a, c, g, or t
  misc_feature (832)..(832): n is a, c, g, or t
  misc_feature (835)..(835): n is a, c, g, or t
  misc_feature (839)..(839): n is a, c, g, or t
  misc_feature (892)..(893): n is a, c, g, or t
  misc_feature (910)..(910): n is a, c, g, or t
  misc_feature (918)..(918): n is a, c, g, or t
  misc_feature (920)..(920): n is a, c, g, or t
  misc_feature (930)..(930): n is a, c, g, or t
  misc_feature (938)..(938): n is a, c, g, or t
  misc_feature (947)..(947): n is a, c, g, or t
  misc_feature (949)..(949): n is a, c, g, or t
cattcaacanattcggttaggcccagtacgccgcaatantaatgagtggnactgtttgggatatanaaaaattttcacgaatggaatcaaaatttctaggcgaatttgctgangggagcagggacaggctcccggtgtgtggctggaaagctcccanaatatcgttaaggccgctttctgaacaagtangtanatatcananaacgcangggtcngcaagatggcttagtataaaagtgctcgccctgnacccanagtacaacgaaagaaccagactcccaaaagttgtattcnncattctcaaatatgctgtggcatgtaacattgtgggcacatgtgtgaccacactcacatncacatgcacctattacacaattnanaacaanacaaaacanacacagcttctgagaaccttgaacccacatncagcattaacatttatganaactggggctaaaagggcaaggagtcaagggatcanaanggctggatcttggncacaaggcaatcacaagacatcnacataagcttggacaanggtctaangncacctgattcccgcctctancaatggnaatananacnnaggtttananancccattttagcaagaatcctcaatccncacacaanacattgacttnaattcaaanccantgacacactcctaaattcaaagacnaacgtatanttnantctncaacccccaaaaaaaaaaatcncggcananatggntttttttccttaaaattggaaggantcatcccgaagctncaatgtccgaacnggggatnttaaagggaangannaaattcctncnanaaggggaggnganaaanaaaaaggctaaaaagggttaagcccttcgggttaggccaacgtttaaccccgnngggggccccctcgttgncattggananccccgtcccnaaggtggngcccccccntnccc

SEQ ID NO: 294 - DNA, 909 bp, Artificial Sequence
  Description of Artificial Sequence: Note = Synthetic Construct
  misc_feature (14)..(14): n is a, c, g, or t
  misc_feature (22)..(22): n is a, c, g, or t
  misc_feature (27)..(27): n is a, c, g, or t
  misc_feature (35)..(35): n is a, c, g, or t
  misc_feature (39)..(39): n is a, c, g, or t
  misc_feature (42)..(42): n is a, c, g, or t
  misc_feature (47)..(48): n is a, c, g, or t
  misc_feature (61)..(61): n is a, c, g, or t
  misc_feature (74)..(74): n is a, c, g, or t
  misc_feature (87)..(87): n is a, c, g, or t
  misc_feature (89)..(89): n is a, c, g, or t
  misc_feature (96)..(97): n is a, c, g, or t
  misc_feature (102)..(102): n is a, c, g, or t
  misc_feature (104)..(104): n is a, c, g, or t
  misc_feature (108)..(108): n is a, c, g, or t
  misc_feature (113)..(114): n is a, c, g, or t
  misc_feature (119)..(119): n is a, c, g, or t
  misc_feature (123)..(123): n is a, c, g, or t
  misc_feature (131)..(132): n is a, c, g, or t
  misc_feature (137)..(137): n is a, c, g, or t
  misc_feature (139)..(139): n is a, c, g, or t
  misc_feature (141)..(141): n is a, c, g, or t
  misc_feature (143)..(143): n is a, c, g, or t
  misc_feature (148)..(148): n is a, c, g, or t
  misc_feature (154)..(154): n is a, c, g, or t
  misc_feature (159)..(160): n is a, c, g, or t
  misc_feature (163)..(163): n is a, c, g, or t
  misc_feature (165)..(165): n is a, c, g, or t
  misc_feature (170)..(171): n is a, c, g, or t
  misc_feature (179)..(179): n is a, c, g, or t
  misc_feature (181)..(181): n is a, c, g, or t
  misc_feature (185)..(185): n is a, c, g, or t
  misc_feature (188)..(189): n is a, c, g, or t
  misc_feature (196)..(196): n is a, c, g, or t
  misc_feature (200)..(200): n is a, c, g, or t
  misc_feature (213)..(213): n is a, c, g, or t
  misc_feature (216)..(216): n is a, c, g, or t
  misc_feature (221)..(222): n is a, c, g, or t
  misc_feature (227)..(227): n is a, c, g, or t
  misc_feature (235)..(235): n is a, c, g, or t
  misc_feature (242)..(242): n is a, c, g, or t
  misc_feature (244)..(244): n is a, c, g, or t
  misc_feature (252)..(252): n is a, c, g, or t
  misc_feature (257)..(257): n is a, c, g, or t
  misc_feature (262)..(263): n is a, c, g, or t
  misc_feature (268)..(268): n is a, c, g, or t
  misc_feature (278)..(278): n is a, c, g, or t
  misc_feature (282)..(282): n is a, c, g, or t
  misc_feature (286)..(286): n is a, c, g, or t
  misc_feature (289)..(289): n is a, c, g, or t
  misc_feature (291)..(291): n is a, c, g, or t
  misc_feature (301)..(301): n is a, c, g, or t
  misc_feature (305)..(306): n is a, c, g, or t
  misc_feature (310)..(310): n is a, c, g, or t
  misc_feature (317)..(317): n is a, c, g, or t
  misc_feature (337)..(337): n is a, c, g, or t
  misc_feature (345)..(345): n is a, c, g, or t
  misc_feature (352)..(352): n is a, c, g, or t
  misc_feature (356)..(356): n is a, c, g, or t
  misc_feature (360)..(360): n is a, c, g, or t
  misc_feature (366)..(366): n is a, c, g, or t
  misc_feature (375)..(375): n is a, c, g, or t
  misc_feature (377)..(378): n is a, c, g, or t
  misc_feature (381)..(383): n is a, c, g, or t
  misc_feature (388)..(388): n is a, c, g, or t
  misc_feature (395)..(395): n is a, c, g, or t
  misc_feature (397)..(397): n is a, c, g, or t
  misc_feature (406)..(406): n is a, c, g, or t
  misc_feature (416)..(417): n is a, c, g, or t
  misc_feature (430)..(430): n is a, c, g, or t
  misc_feature (436)..(436): n is a, c, g, or t
  misc_feature (450)..(451): n is a, c, g, or t
  misc_feature (455)..(455): n is a, c, g, or t
  misc_feature (458)..(458): n is a, c, g, or t
  misc_feature (464)..(464): n is a, c, g, or t
  misc_feature (471)..(471): n is a, c, g, or t
  misc_feature (477)..(477): n is a, c, g, or t
  misc_feature (481)..(481): n is a, c, g, or t
  misc_feature (483)..(484): n is a, c, g, or t
  misc_feature (489)..(489): n is a, c, g, or t
  misc_feature (507)..(507): n is a, c, g, or t
  misc_feature (512)..(512): n is a, c, g, or t
  misc_feature (556)..(557): n is a, c, g, or t
  misc_feature (559)..(559): n is a, c, g, or t
  misc_feature (585)..(585): n is a, c, g, or t
  misc_feature (606)..(606): n is a, c, g, or t
  misc_feature (615)..(615): n is a, c, g, or t
  misc_feature (623)..(624): n is a, c, g, or t
  misc_feature (658)..(658): n is a, c, g, or t
  misc_feature (668)..(668): n is a, c, g, or t
  misc_feature (707)..(707): n is a, c, g, or t
  misc_feature (710)..(710): n is a, c, g, or t
  misc_feature (715)..(715): n is a, c, g, or t
  misc_feature (732)..(732): n is a, c, g, or t
  misc_feature (735)..(735): n is a, c, g, or t
  misc_feature (741)..(741): n is a, c, g, or t
  misc_feature (745)..(745): n is a, c, g, or t
  misc_feature (763)..(763): n is a, c, g, or t
  misc_feature (777)..(778): n is a, c, g, or t
  misc_feature (781)..(781): n is a, c, g, or t
  misc_feature (787)..(788): n is a, c, g, or t
  misc_feature (803)..(803): n is a, c, g, or t
  misc_feature (807)..(807): n is a, c, g, or t
  misc_feature (822)..(822): n is a, c, g, or t
  misc_feature (840)..(840): n is a, c, g, or t
  misc_feature (848)..(849): n is a, c, g, or t
  misc_feature (851)..(851): n is a, c, g, or t
  misc_feature (868)..(868): n is a, c, g, or t
  misc_feature (905)..(905): n is a, c, g, or t
caattcactttgantcacatgngcccntgcgatanaatnaangactnngctctgccttaanaaatcaaaattcnagtgatcaaagcntntagtgcnncctgncncccncctgnntgctnagtnataattgnnctcgncntngntcccngttcancaaannaantnttcgnnagaaatgngncggntgnntgccgtnactnaggaaactgctgnctnacaanngtgtnctgggtcntgtccgntncaccaaanggtgngtgtnncaganattagtctgnagcntganggnantaaggacacnctcnnattnctctgcntgttgggtaatgtctgtgcntcaaaccngctgganttcnagtnctacgnctccatcangnncgnnncaatnttcggantntgaagactnttcagccttnnctacatctacccnccgggnctggataaaagtgnnatgnacncttccnaccactnggatantggnanngtcangaatgcccctcctttccntcatngctccatcgggccctgattcactctctctgtcttctccctcaanngnggaaactgaacaccctcctggccccnacaagtttcaaatgttggaanaggctgaanttcctctnngcagggcccataaaatcgggggccgaaaaaaacntcaaattccnagtctgtcgaaatcgatagggacacttgcagaggaaagngcnagaancccctgtctataaaacncgngttgtntcanaaaaaaaaaagttcctgnaaataggaccaacnnaangggggnnctcctcaaatgcccncctnccccaattgaaaggnattatcccttgcgcgggngggccctnnantacccaacccccgaaanaaaccaaaacaatccccattggggggctaggtccccnccaa

SEQ ID NO: 295 - DNA, 951 bp, Artificial Sequence
  Description of Artificial Sequence: Note = Synthetic Construct
  misc_feature (23)..(23): n is a, c, g, or t
  misc_feature (96)..(96): n is a, c, g, or t
  misc_feature (200)..(200): n is a, c, g, or t
  misc_feature (218)..(218): n is a, c, g, or t
  misc_feature (251)..(251): n is a, c, g, or t
  misc_feature (268)..(268): n is a, c, g, or t
  misc_feature (288)..(288): n is a, c, g, or t
  misc_feature (330)..(330): n is a, c, g, or t
  misc_feature (444)..(444): n is a, c, g, or t
  misc_feature (512)..(512): n is a, c, g, or t
  misc_feature (527)..(527): n is a, c, g, or t
  misc_feature (531)..(531): n is a, c, g, or t
  misc_feature (536)..(536): n is a, c, g, or t
  misc_feature (542)..(542): n is a, c, g, or t
  misc_feature (581)..(581): n is a, c, g, or t
  misc_feature (592)..(592): n is a, c, g, or t
  misc_feature (631)..(631): n is a, c, g, or t
  misc_feature (639)..(639): n is a, c, g, or t
  misc_feature (658)..(658): n is a, c, g, or t
  misc_feature (661)..(662): n is a, c, g, or t
  misc_feature (697)..(697): n is a, c, g, or t
  misc_feature (706)..(706): n is a, c, g, or t
  misc_feature (713)..(713): n is a, c, g, or t
  misc_feature (729)..(729): n is a, c, g, or t
  misc_feature (736)..(736): n is a, c, g, or t
  misc_feature (762)..(762): n is a, c, g, or t
  misc_feature (768)..(768): n is a, c, g, or t
  misc_feature (779)..(779): n is a, c, g, or t
  misc_feature (827)..(828): n is a, c, g, or t
  misc_feature (831)..(831): n is a, c, g, or t
  misc_feature (834)..(834): n is a, c, g, or t
  misc_feature (837)..(837): n is a, c, g, or t
  misc_feature (839)..(839): n is a, c, g, or t
  misc_feature (858)..(858): n is a, c, g, or t
  misc_feature (866)..(867): n is a, c, g, or t
  misc_feature (884)..(884): n is a, c, g, or t
  misc_feature (910)..(910): n is a, c, g, or t
  misc_feature (915)..(915): n is a, c, g, or t
  misc_feature (918)..(919): n is a, c, g, or t
  misc_feature (931)..(932): n is a, c, g, or t
  misc_feature (937)..(937): n is a, c, g, or t
  misc_feature (943)..(943): n is a, c, g, or t
  misc_feature (945)..(945): n is a, c, g, or t
  misc_feature (947)..(947): n is a, c, g, or t
cattccattgattctgaaggacntgacaatgtcttcaataatcaagatttctggaatgtctgtatatctaacagagaagttctcacatttcattanaaaaaaagtttcaaagtcacaatatccctgtccctaaaaaatcaatatagttttatgacaggtcatctttttaaaagacaattaaaatatcagggactgaaganatggcttaggattaagancactatctgttctcccagaagaacttggattcnattcccagcactacaangcagctgacaactgtctgtnactccagcccagggaatctgacccctcttctataccctgcangcacggggcatacagacatatacaggttaaaaataaaaattaaaaactgtctttaaaaaaaattccaacagagctagagagacactgactgctctcccagaagtcctaaattcnaggccagaaatcccatggtggctcacaaccatctgttatcccaacccttttctgatgtgtcttaaganagtgacatgtgctcncatncttangggttngggattactcatggtataacgcttgcctaacaaacacanggcctgggttngtcctcactcccaaaaaaaaaaaaaatctgccggtgtcncaatttgnttaacaaaaattgccccanccnnttattattactttcggttgacttggcggttggtcnctggtgganagggatnccccgggatccggatnccctggncttatttggccttaaaaacttgggcntttttncaattaaaatngtctgtgcggcccgaaccaatccctttttttgaacgtgagaaaaaagnnacnctncantnttttcctggaggtaaaacncaatcccnnatatccaagggtttttngatgaaaataacctggtcccgttaancgtgnggnnttaaaaaaaccnnattgngggggntngnttta

SEQ ID NO: 296 - DNA, 973 bp, Artificial Sequence
  Description of Artificial Sequence: Note = Synthetic Construct
  misc_feature (8)..(9): n is a, c, g, or t
  misc_feature (25)..(25): n is a, c, g, or t
  misc_feature (38)..(38): n is a, c, g, or t
  misc_feature (45)..(45): n is a, c, g, or t
  misc_feature (49)..(49): n is a, c, g, or t
  misc_feature (52)..(52): n is a, c, g, or t
  misc_feature (55)..(55): n is a, c, g, or t
  misc_feature (90)..(90): n is a, c, g, or t
  misc_feature (93)..(93): n is a, c, g, or t
  misc_feature (104)..(104): n is a, c, g, or t
  misc_feature (108)..(109): n is a, c, g, or t
  misc_feature (115)..(115): n is a, c, g, or t
  misc_feature (125)..(125): n is a, c, g, or t
  misc_feature (156)..(156): n is a, c, g, or t
  misc_feature (174)..(175): n is a, c, g, or t
  misc_feature (178)..(178): n is a, c, g, or t
  misc_feature (181)..(181): n is a, c, g, or t
  misc_feature (185)..(185): n is a, c, g, or t
  misc_feature (196)..(196): n is a, c, g, or t
  misc_feature (209)..(210): n is a, c, g, or t
  misc_feature (224)..(224): n is a, c, g, or t
  misc_feature (231)..(232): n is a, c, g, or t
  misc_feature (240)..(240): n is a, c, g, or t
  misc_feature (255)..(255): n is a, c, g, or t
  misc_feature (260)..(260): n is a, c, g, or t
  misc_feature (275)..(275): n is a, c, g, or t
  misc_feature (280)..(280): n is a, c, g, or t
  misc_feature (288)..(289): n is a, c, g, or t
  misc_feature (291)..(293): n is a, c, g, or t
  misc_feature (300)..(300): n is a, c, g, or t
  misc_feature (303)..(303): n is a, c, g, or t
  misc_feature (305)..(305): n is a, c, g, or t
  misc_feature (308)..(308): n is a, c, g, or t
  misc_feature (312)..(313): n is a, c, g, or t
  misc_feature (315)..(315): n is a, c, g, or t
  misc_feature (324)..(324): n is a, c, g, or t
  misc_feature (330)..(330): n is a, c, g, or t
  misc_feature (333)..(333): n is a, c, g, or t
  misc_feature (348)..(348): n is a, c, g, or t
  misc_feature (357)..(357): n is a, c, g, or t
  misc_feature (364)..(364): n is a, c, g, or t
  misc_feature (370)..(370): n is a, c, g, or t
  misc_feature (394)..(394): n is a, c, g, or t
  misc_feature (397)..(397): n is a, c, g, or t
  misc_feature (400)..(400): n is a, c, g, or t
  misc_feature (404)..(404): n is a, c, g, or t
  misc_feature (407)..(407): n is a, c, g, or t
  misc_feature (413)..(413): n is a, c, g, or t
  misc_feature (415)..(415): n is a, c, g, or t
  misc_feature (428)..(428): n is a, c, g, or t
  misc_feature (435)..(435): n is a, c, g, or t
  misc_feature (446)..(446): n is a, c, g, or t
  misc_feature (450)..(450): n is a, c, g, or t
  misc_feature (457)..(457): n is a, c, g, or t
  misc_feature (461)..(461): n is a, c, g, or t
  misc_feature (464)..(464): n is a, c, g, or t
  misc_feature (472)..(472): n is a, c, g, or t
  misc_feature (476)..(476): n is a, c, g, or t
  misc_feature (487)..(487): n is a, c, g, or t
  misc_feature (500)..(502): n is a, c, g, or t
  misc_feature (504)..(504): n is a, c, g, or t
  misc_feature (514)..(514): n is a, c, g, or t
  misc_feature (525)..(525): n is a, c, g, or t
  misc_feature (533)..(533): n is a, c, g, or t
  misc_feature (538)..(538): n is a, c, g, or t
  misc_feature (544)..(544): n is a, c, g, or t
  misc_feature (550)..(550): n is a, c, g, or t
  misc_feature (554)..(554): n is a, c, g, or t
  misc_feature (572)..(572): n is a, c, g, or t
  misc_feature (576)..(577): n is a, c, g, or t
  misc_feature (586)..(586): n is a, c, g, or t
  misc_feature (606)..(606): n is a, c, g, or t
  misc_feature (617)..(617): n is a, c, g, or t
  misc_feature (639)..(639): n is a, c, g, or t
  misc_feature (642)..(643): n is a, c, g, or t
  misc_feature (645)..(646): n is a, c, g, or t
  misc_feature (648)..(648): n is a, c, g, or t
  misc_feature (655)..(655): n is a, c, g, or t
  misc_feature (660)..(660): n is a, c, g, or t
  misc_feature (665)..(665): n is a, c, g, or t
  misc_feature (673)..(673): n is a, c, g, or t
  misc_feature (678)..(679): n is a, c, g, or t
  misc_feature (686)..(686): n is a, c, g, or t
  misc_feature (690)..(690): n is a, c, g, or t
  misc_feature (693)..(693): n is a, c, g, or t
  misc_feature (698)..(698): n is a, c, g, or t
  misc_feature (700)..(700): n is a, c, g, or t
  misc_feature (712)..(712): n is a, c, g, or t
  misc_feature (724)..(725): n is a, c, g, or t
  misc_feature (728)..(728): n is a, c, g, or t
  misc_feature (744)..(744): n is a, c, g, or t
  misc_feature (746)..(746): n is a, c, g, or t
  misc_feature (748)..(748): n is a, c, g, or t
  misc_feature (754)..(755): n is a, c, g, or t
  misc_feature (758)..(758): n is a, c, g, or t
  misc_feature (768)..(768): n is a, c, g, or t
  misc_feature (774)..(774): n is a, c, g, or t
  misc_feature (783)..(783): n is a, c, g, or t
  misc_feature (787)..(787): n is a, c, g, or t
  misc_feature (807)..(807): n is a, c, g, or t
  misc_feature (814)..(818): n is a, c, g, or t
  misc_feature (823)..(823): n is a, c, g, or t
  misc_feature (827)..(828): n is a, c, g, or t
  misc_feature (841)..(841): n is a, c, g, or t
  misc_feature (847)..(847): n is a, c, g, or t
  misc_feature (851)..(852): n is a, c, g, or t
  misc_feature (854)..(854): n is a, c, g, or t
  misc_feature (867)..(868): n is a, c, g, or t
  misc_feature (870)..(871): n is a, c, g, or t
  misc_feature (877)..(878): n is a, c, g, or t
  misc_feature (886)..(886): n is a, c, g, or t
  misc_feature (894)..(894): n is a, c, g, or t
  misc_feature (896)..(896): n is a, c, g, or t
  misc_feature (900)..(900): n is a, c, g, or t
  misc_feature (918)..(918): n is a, c, g, or t
  misc_feature (931)..(932): n is a, c, g, or t
  misc_feature (937)..(937): n is a, c, g, or t
  misc_feature (942)..(942): n is a, c, g, or t
  misc_feature (952)..(952): n is a, c, g, or t
cattcaanntgaatccgcctagaantcttgattccaancgtgaantatnttnccntatcccgaaaaatccacttatcactactgcggccnaangggaaactaanctanntcaccncgttactcanatacggctcaccaaattttgataaatctctntaagtacccatatttctnnaanccngctnctgggaactanctgaattccgctnntttccactttgccncactttnntgactggnctgttcgggatattnaatanttttcacgaatggantcaancatttctnngnnnaattccnttncntantccnnantctggtgtnttttcnctnaaagctatgaacttngcctgcacnggatctngatttntgtattctggttacatgccccttnccnctnatcnctntcgacncngtagctctacttnccttagntaattggttgntatnatttaancgtntantcttggantgtngtgtgactcangtcttccttttcnnntncccatttaantggttataacntggacccngtgcnttcctntgggancatncccttctgtagggctccntttnntccgggccnattcttttttccgttctcgnggcctcaattnttctcatttcatctgtccttantgnntnncnataggangccgnttttntttcctcnctttnnaagttcncatntanatatncngtacagacccantaatcgttatcnnggnatccccgattattgangntnggcctnnctncaataattcnttttcnctctctgantttntggtctgttccctctccgtntcctacnnnnntaatntctnnctctcctaatatntccccngagnncngggccgtttattnntnngccttnnatgtcttncttctctncntctnccttcttaatagtctttntcccttctaccanntctcntaaangtcaccttcntttccttctctcttccttctc

SEQ ID NO: 297 - DNA, 921 bp, Artificial Sequence
  Description of Artificial Sequence: Note = Synthetic Construct
  misc_feature (28)..(28): n is a, c, g, or t
  misc_feature (75)..(75): n is a, c, g, or t
  misc_feature (184)..(184): n is a, c, g, or t
  misc_feature (285)..(286): n is a, c, g, or t
  misc_feature (304)..(304): n is a, c, g, or t
  misc_feature (306)..(306): n is a, c, g, or t
  misc_feature (309)..(309): n is a, c, g, or t
  misc_feature (353)..(353): n is a, c, g, or t
  misc_feature (361)..(361): n is a, c, g, or t
  misc_feature (374)..(374): n is a, c, g, or t
  misc_feature (415)..(415): n is a, c, g, or t
  misc_feature (448)..(448): n is a, c, g, or t
  misc_feature (456)..(456): n is a, c, g, or t
  misc_feature (496)..(496): n is a, c, g, or t
  misc_feature (512)..(512): n is a, c, g, or t
  misc_feature (574)..(574): n is a, c, g, or t
  misc_feature (580)..(580): n is a, c, g, or t
  misc_feature (599)..(599): n is a, c, g, or t
  misc_feature (612)..(612): n is a, c, g, or t
  misc_feature (626)..(626): n is a, c, g, or t
  misc_feature (708)..(708): n is a, c, g, or t
  misc_feature (711)..(711): n is a, c, g, or t
  misc_feature (719)..(719): n is a, c, g, or t
  misc_feature (731)..(731): n is a, c, g, or t
  misc_feature (746)..(746): n is a, c, g, or t
  misc_feature (749)..(749): n is a, c, g, or t
  misc_feature (752)..(752): n is a, c, g, or t
  misc_feature (757)..(757): n is a, c, g, or t
  misc_feature (760)..(760): n is a, c, g, or t
  misc_feature (762)..(762): n is a, c, g, or t
  misc_feature (767)..(767): n is a, c, g, or t
  misc_feature (773)..(775): n is a, c, g, or t
  misc_feature (788)..(788): n is a, c, g, or t
  misc_feature (803)..(803): n is a, c, g, or t
  misc_feature (814)..(814): n is a, c, g, or t
  misc_feature (832)..(832): n is a, c, g, or t
  misc_feature (845)..(845): n is a, c, g, or t
  misc_feature (849)..(849): n is a, c, g, or t
  misc_feature (856)..(859): n is a, c, g, or t
  misc_feature (862)..(863): n is a, c, g, or t
  misc_feature (869)..(869): n is a, c, g, or t
  misc_feature (874)..(874): n is a, c, g, or t
  misc_feature (884)..(884): n is a, c, g, or t
  misc_feature (907)..(907): n is a, c, g, or t
  misc_feature (913)..(913): n is a, c, g, or t
caattccattgaatcgtaaaatacctancagaaaatgtagagcctgtagaaccacgttcttttagaacctgagangtagtgttttaaaatagtcttaactaaaagggcttcctgcacccactttgttcttttatcccttacttttcatccagtatggtttttcaatatcacacgtttaatctangaactccttgcttaaagcaattacaagttaaattaaaagtaagaagaatggcttatagctctcattactgggatgcaggtgtgaaacaagtgatttgtgtnnaagctggcaggatgggtntngtncaagaacacgtgcccagaagatgtattgaaagttgggatttaantctctgantaatttatgctangcggtagcattgaacaagatgaatctctggtcatagaagtnaaactgcccagattctgaagaaatgtgaagganaacattanatgttactgttggggattgggaaggcagaaaacttactcnatgcccaaggaaggtngaaaaaaggttgggcttaacttgaagacggagggaactggtggtggatataagatggtatcnaaaacnaaatggttcactatgatcnctgaaaaaccccngttggttggcaccnctgaagatcttcccctaataacaaatgatttcccccgtcccggccttggtgaaagcttccgcttaatgggcaaaaaaacggntcnttaccccnttccgtttcccnggggccggctttttnaanacnttggnccnanaaacnaaaaannnggtttttggggcnaaaggttctcccttnccctttttaangaaaaaggtttggaattngggttcctccccncccnaaattcnnnntannggggtnttttngtcccccccnaaacccaaactcggactttattnaaaaangccccccc

SEQ ID NO: 298 - DNA, 852 bp, Artificial Sequence
  Description of Artificial Sequence: Note = Synthetic Construct
cggctgtagtgggagtgttcgagcatccacttgggtaaacctcattctcccgtccttgttcccggtttctgacccggcgtggcatttcatggtttcttctatccgtccccttccttgtctagtcccctctcctcggccacctcttgctttggtcctcttcttagtcttctaaagaaccattgccccggagcggcccatgtgcgacctcgggtaggacgggcttggcggcgtcgagtgtggcccgggaagcccctgggcgcgtctgagggactgtggggtctcggggtctggacatgtctgaacacagctgggtgaaggccacctcggtccggagctgtctccgtcgtaggagaaggaatggagagttcgtaaaatacagtaacagaaaactgtagaggctctgtaggatccacgttcttctagaacttgggaagtagtatttaaaaatagtctaactaaaagggcttcctgcacccactttgtgatttttttttaaatcccttttcatccagcatagttttttcaaaaatcacaagtttaatgtagtagctccttgcttaaagcaattacaagttaaatttaaaaagaaaaaaaaaagatggcttatagcgctcattattgggatgcaggtgtgaaacaagtgatttgtgtggaagctggcaggatggatatgctacaagaacacgtgcccagaggatgtattgaaagttcaggtatctcagtagaatatgctaggcgctacgattaatgaacaagaggccttcgaagtagaaactgtacaaattctgaggaaatgcgagggagagtgttggatgccactgttggggatttgagaaggccaggaaacattac

SEQ ID NO: 299 - DNA, 339 bp, Artificial Sequence
  Description of Artificial Sequence: Note = Synthetic Construct
  misc_feature (25)..(26): n is a, c, g, or t
  misc_feature (37)..(37): n is a, c, g, or t
  misc_feature (50)..(50): n is a, c, g, or t
  misc_feature (52)..(52): n is a, c, g, or t
  misc_feature (269)..(269): n is a, c, g, or t
  misc_feature (328)..(328): n is a, c, g, or t
caattccattttaatcgcctagagnntttattccaancgtgaaaattttncnataccccgaacagtccacttattactactgccgcctattgggaactaaccgagttcaccatgttactcagattcggctaaccaaatttttataaatctttaaaagtacacatattacaagagcaggctactaggaactaactgaattcggtagtgctccttttgtttctattttgtggaataatttggacagtattggtatgagatcttctatgaangtctgatagaattctcagtctggctgctgtgtgaggcagtgtctggagaatggggcttnggcaatagcag

SEQ ID NO: 300 - DNA, 853 bp, Artificial Sequence
  Description of Artificial Sequence: Note = Synthetic Construct
  misc_feature (21)..(21): n is a, c, g, or t
  misc_feature (53)..(53): n is a, c, g, or t
  misc_feature (236)..(236): n is a, c, g, or t
  misc_feature (333)..(333): n is a, c, g, or t
  misc_feature (384)..(384): n is a, c, g, or t
  misc_feature (396)..(397): n is a, c, g, or t
  misc_feature (406)..(406): n is a, c, g, or t
  misc_feature (429)..(429): n is a, c, g, or t
  misc_feature (482)..(482): n is a, c, g, or t
  misc_feature (509)..(509): n is a, c, g, or t
  misc_feature (553)..(553): n is a, c, g, or t
  misc_feature (560)..(560): n is a, c, g, or t
  misc_feature (578)..(578): n is a, c, g, or t
  misc_feature (592)..(592): n is a, c, g, or t
  misc_feature (649)..(649): n is a, c, g, or t
  misc_feature (693)..(693): n is a, c, g, or t
  misc_feature (706)..(706): n is a, c, g, or t
  misc_feature (708)..(708): n is a, c, g, or t
  misc_feature (711)..(712): n is a, c, g, or t
  misc_feature (736)..(736): n is a, c, g, or t
  misc_feature (743)..(743): n is a, c, g, or t
  misc_feature (754)..(754): n is a, c, g, or t
  misc_feature (769)..(769): n is a, c, g, or t
  misc_feature (782)..(782): n is a, c, g, or t
  misc_feature (784)..(784): n is a, c, g, or t
  misc_feature (786)..(786): n is a, c, g, or t
  misc_feature (802)..(802): n is a, c, g, or t
  misc_feature (805)..(805): n is a, c, g, or t
  misc_feature (813)..(813): n is a, c, g, or t
  misc_feature (817)..(817): n is a, c, g, or t
  misc_feature (825)..(825): n is a, c, g, or t
  misc_feature (828)..(830): n is a, c, g, or t
  misc_feature (837)..(837): n is a, c, g, or t
  misc_feature (846)..(846): n is a, c, g, or t
  misc_feature (851)..(851): n is a, c, g, or t
caattcaacttatcaaaagtnatgccgatcggctcacaaattttgatatatcnttaaaagtacacatattacaagagcctgctactaggaactaactgatttcacaaagaaacagtgttccagttcgttaaaacattgctctatcttgaataacaagcttattacttgcgatccttgggacctattgaattcacagagatcctcctgtctctgcctcctgagttcagggattagangatgtgcctttactcccagctgcaaactcccgttctgcttgcaaagcttctccattcttctccttctatcattttcttcctgtctttccttgtgggnccatgcttctcttcaggcccctgattcaagtatgtgtttctctcccccccncccccgcccgtnnattcctcanactttcccttccctgggctgcanagttcctctcttcttcatgccagtcctttctatttccctccaatcagctctanaaagcctattctaggaggccttcccanaacactttctgtttgggtgctctgaatctgcgttacatacccanacatggntctactaactgctggaantaattgtgtgtgcncatatttgtagtttgtaatgcccagtagtgtgtgtgtaaggtgtgaagcatatgttngacatgtgtgtggaggcaaaaatcatgttgggtgttctctactnattttgaaaaagncnctnntgaaatccactccctccggtaaangggggcncaactgtgganccctgttcccccccnggcgaaaaagaananangcgtgccacttttgtngtnaaaatcangagnccgaacanttnnnttccttngaacgtccnggccnat

SEQ ID NO: 301 - DNA, 909 bp, Artificial Sequence; identical to SEQ ID NO: 294
  Description of Artificial Sequence: Note = Synthetic Construct
  misc_feature (14)..(14): n is a, c, g, or t
  misc_feature (22)..(22): n is a, c, g, or t
  misc_feature (27)..(27): n is a, c, g, or t
  misc_feature (35)..(35): n is a, c, g, or t
  misc_feature (39)..(39): n is a, c, g, or t
  misc_feature (42)..(42): n is a, c, g, or t
  misc_feature (47)..(48): n is a, c, g, or t
  misc_feature (61)..(61): n is a, c, g, or t
  misc_feature (74)..(74): n is a, c, g, or t
  misc_feature (87)..(87): n is a, c, g, or t
  misc_feature (89)..(89): n is a, c, g, or t
  misc_feature (96)..(97): n is a, c, g, or t
  misc_feature (102)..(102): n is a, c, g, or t
  misc_feature (104)..(104): n is a, c, g, or t
  misc_feature (108)..(108): n is a, c, g, or t
  misc_feature (113)..(114): n is a, c, g, or t
  misc_feature (119)..(119): n is a, c, g, or t
  misc_feature (123)..(123): n is a, c, g, or t
  misc_feature (131)..(132): n is a, c, g, or t
  misc_feature (137)..(137): n is a, c, g, or t
  misc_feature (139)..(139): n is a, c, g, or t
  misc_feature (141)..(141): n is a, c, g, or t
  misc_feature (143)..(143): n is a, c, g, or t
  misc_feature (148)..(148): n is a, c, g, or t
  misc_feature (154)..(154): n is a, c, g, or t
  misc_feature (159)..(160): n is a, c, g, or t
  misc_feature (163)..(163): n is a, c, g, or t
  misc_feature (165)..(165): n is a, c, g, or t
  misc_feature (170)..(171): n is a, c, g, or t
  misc_feature (179)..(179): n is a, c, g, or t
  misc_feature (181)..(181): n is a, c, g, or t
  misc_feature (185)..(185): n is a, c, g, or t
  misc_feature (188)..(189): n is a, c, g, or t
  misc_feature (196)..(196): n is a, c, g, or t
  misc_feature (200)..(200): n is a, c, g, or t
  misc_feature (213)..(213): n is a, c, g, or t
  misc_feature (216)..(216): n is a, c, g, or t
  misc_feature (221)..(222): n is a, c, g, or t
  misc_feature (227)..(227): n is a, c, g, or t
  misc_feature (235)..(235): n is a, c, g, or t
  misc_feature (242)..(242): n is a, c, g, or t
  misc_feature (244)..(244): n is a, c, g, or t
  misc_feature (252)..(252): n is a, c, g, or t
  misc_feature (257)..(257): n is a, c, g, or t
  misc_feature (262)..(263): n is a, c, g, or t
  misc_feature (268)..(268): n is a, c, g, or t
  misc_feature (278)..(278): n is a, c, g, or t
  misc_feature (282)..(282): n is a, c, g, or t
  misc_feature (286)..(286): n is a, c, g, or t
  misc_feature (289)..(289): n is a, c, g, or t
  misc_feature (291)..(291): n is a, c, g, or t
  misc_feature (301)..(301): n is a, c, g, or t
  misc_feature (305)..(306): n is a, c, g, or t
  misc_feature (310)..(310): n is a, c, g, or t
  misc_feature (317)..(317): n is a, c, g, or t
  misc_feature (337)..(337): n is a, c, g, or t
  misc_feature (345)..(345): n is a, c, g, or t
  misc_feature (352)..(352): n is a, c, g, or t
  misc_feature (356)..(356): n is a, c, g, or t
  misc_feature (360)..(360): n is a, c, g, or t
  misc_feature (366)..(366): n is a, c, g, or t
  misc_feature (375)..(375): n is a, c, g, or t
  misc_feature (377)..(378): n is a, c, g, or t
  misc_feature (381)..(383): n is a, c, g, or t
  misc_feature (388)..(388): n is a, c, g, or t
  misc_feature (395)..(395): n is a, c, g, or t
  misc_feature (397)..(397): n is a, c, g, or t
  misc_feature (406)..(406): n is a, c, g, or t
  misc_feature (416)..(417): n is a, c, g, or t
  misc_feature (430)..(430): n is a, c, g, or t
  misc_feature (436)..(436): n is a, c, g, or t
  misc_feature (450)..(451): n is a, c, g, or t
  misc_feature (455)..(455): n is a, c, g, or t
  misc_feature (458)..(458): n is a, c, g, or t
  misc_feature (464)..(464): n is a, c, g, or t
  misc_feature (471)..(471): n is a, c, g, or t
  misc_feature (477)..(477): n is a, c, g, or t
  misc_feature (481)..(481): n is a, c, g, or t
  misc_feature (483)..(484): n is a, c, g, or t
  misc_feature (489)..(489): n is a, c, g, or t
  misc_feature (507)..(507): n is a, c, g, or t
  misc_feature (512)..(512): n is a, c, g, or t
  misc_feature (556)..(557): n is a, c, g, or t
  misc_feature (559)..(559): n is a, c, g, or t
  misc_feature (585)..(585): n is a, c, g, or t
  misc_feature (606)..(606): n is a, c, g, or t
  misc_feature (615)..(615): n is a, c, g, or t
  misc_feature (623)..(624): n is a, c, g, or t
  misc_feature (658)..(658): n is a, c, g, or t
  misc_feature (668)..(668): n is a, c, g, or t
  misc_feature (707)..(707): n is a, c, g, or t
  misc_feature (710)..(710): n is a, c, g, or t
  misc_feature (715)..(715): n is a, c, g, or t
  misc_feature (732)..(732): n is a, c, g, or t
  misc_feature (735)..(735): n is a, c, g, or t
  misc_feature (741)..(741): n is a, c, g, or t
  misc_feature (745)..(745): n is a, c, g, or t
  misc_feature (763)..(763): n is a, c, g, or t
  misc_feature (777)..(778): n is a, c, g, or t
  misc_feature (781)..(781): n is a, c, g, or t
  misc_feature (787)..(788): n is a, c, g, or t
  misc_feature (803)..(803): n is a, c, g, or t
  misc_feature (807)..(807): n is a, c, g, or t
  misc_feature (822)..(822): n is a, c, g, or t
  misc_feature (840)..(840): n is a, c, g, or t
  misc_feature (848)..(849): n is a, c, g, or t
  misc_feature (851)..(851): n is a, c, g, or t
  misc_feature (868)..(868): n is a, c, g, or t
  misc_feature (905)..(905): n is a, c, g, or t

SEQ ID NO: 302 - DNA, 716 bp, Artificial Sequence
  Description of Artificial Sequence: Note = Synthetic Construct
  misc_feature (1)..(1): n is a, c, g, or t
  misc_feature (6)..(7): n is a, c, g, or t
  misc_feature (26)..(26): n is a, c, g, or t
  misc_feature (40)..(40): n is a, c, g, or t
  misc_feature (80)..(80): n is a, c, g, or t
  misc_feature (101)..(101): n is a, c, g, or t
  misc_feature (104)..(104): n is a, c, g, or t
  misc_feature (120)..(120): n is a, c, g, or t
  misc_feature (145)..(145): n is a, c, g, or t
  misc_feature (197)..(197): n is a, c, g, or t
  misc_feature (201)..(201): n is a, c, g, or t
  misc_feature (321)..(321): n is a, c, g, or t
  misc_feature (326)..(326): n is a, c, g, or t
  misc_feature (346)..(346): n is a, c, g, or t
  misc_feature (373)..(373): n is a, c, g, or t
  misc_feature (401)..(401): n is a, c, g, or t
  misc_feature (435)..(435): n is a, c, g, or t
  misc_feature (440)..(440): n is a, c, g, or t
  misc_feature (473)..(473): n is a, c, g, or t
  misc_feature (479)..(479): n is a, c, g, or t
  misc_feature (511)..(511): n is a, c, g, or t
  misc_feature (524)..(524): n is a, c, g, or t
  misc_feature (542)..(542): n is a, c, g, or t
  misc_feature (561)..(561): n is a, c, g, or t
  misc_feature (563)..(564): n is a, c, g, or t
  misc_feature (577)..(577): n is a, c, g, or t
  misc_feature (579)..(579): n is a, c, g, or t
  misc_feature (594)..(594): n is a, c, g, or t
  misc_feature (622)..(622): n is a, c, g, or t
  misc_feature (625)..(625): n is a, c, g, or t
  misc_feature (627)..(627): n is a, c, g, or t
  misc_feature (631)..(631): n is a, c, g, or t
  misc_feature (637)..(637): n is a, c, g, or t
  misc_feature (639)..(639): n is a, c, g, or t
  misc_feature (655)..(655): n is a, c, g, or t
  misc_feature (665)..(665): n is a, c, g, or t
  misc_feature (670)..(670): n is a, c, g, or t
  misc_feature (674)..(674): n is a, c, g, or t
  misc_feature (699)..(699): n is a, c, g, or t
  misc_feature (710)..(710): n is a, c, g, or t
nggggnntggcaatccctttcatgtntacccattcctgangctccttctgtcacacgtacccacacatagtgtgtggcanggagctgtctgctgtgtggangangttagcagccctgtanagtttggcttttgcttcctgcatantaagaccttttttttttttttttttttggttctttttttttggagctgggantaangaccttttaaagcagggaatgtgtgtcctgatttttgaaagattgatcatgtggttgtgaagtcatggggtaggagaaggatctaagctaaattggggaactgttggcgacgttggatcngctanttggacaaaggtggcgaccngtggaagtgacaggaagtgaaacatantgactgacttgaaactgacaaactaccnccattggatatggtctatccaattctgatttganccagncactggtgtccccccccatgacgaaatgaaganacatgngttggaaaatctaaccctgattttgaatatcngttcagtacatgnggtattggaaacaaaacntaattggttcgcagttttncnngtaccctcgggcntnggcggcattggaccncgttatatattaattgttacgcttccanccngngaantcgaancnttgaataaaacagaangccccccccnaccgnccgnggttgaaacccccaaaccctcctgngggggttccgngctaat

SEQ ID NO: 303 - DNA, 1095 bp, Artificial Sequence
  Description of Artificial Sequence: Note = Synthetic Construct
  misc_feature (34)..(34): n is a, c, g, or t
  misc_feature (66)..(66): n is a, c, g, or t
  misc_feature (190)..(190): n is a, c, g, or t
  misc_feature (225)..(225): n is a, c, g, or t
  misc_feature (257)..(257): n is a, c, g, or t
  misc_feature (319)..(319): n is a, c, g, or t
  misc_feature (348)..(348): n is a, c, g, or t
  misc_feature (355)..(355): n is a, c, g, or t
  misc_feature (364)..(364): n is a, c, g, or t
  misc_feature (374)..(374): n is a, c, g, or t
  misc_feature (382)..(382): n is a, c, g, or t
  misc_feature (401)..(401): n is a, c, g, or t
  misc_feature (429)..(429): n is a, c, g, or t
  misc_feature (433)..(433): n is a, c, g, or t
  misc_feature (471)..(471): n is a, c, g, or t
  misc_feature (501)..(501): n is a, c, g, or t
  misc_feature (525)..(525): n is a, c, g, or t
  misc_feature (530)..(530): n is a, c, g, or t
  misc_feature (535)..(535): n is a, c, g, or t
  misc_feature (562)..(563): n is a, c, g, or t
  misc_feature (579)..(579): n is a, c, g, or t
  misc_feature (604)..(604): n is a, c, g, or t
  misc_feature (650)..(650): n is a, c, g, or t
  misc_feature (679)..(679): n is a, c, g, or t
  misc_feature (688)..(688): n is a, c, g, or t
  misc_feature (752)..(752): n is a, c, g, or t
  misc_feature (767)..(767): n is a, c, g, or t
  misc_feature (800)..(800): n is a, c, g, or t
  misc_feature (808)..(808): n is a, c, g, or t
  misc_feature (824)..(824): n is a, c, g, or t
  misc_feature (835)..(835): n is a, c, g, or t
  misc_feature (842)..(842): n is a, c, g, or t
  misc_feature (849)..(849): n is a, c, g, or t
  misc_feature (856)..(856): n is a, c, g, or t
  misc_feature (930)..(930): n is a, c, g, or t
  misc_feature (946)..(946): n is a, c, g, or t
  misc_feature (956)..(956): n is a, c, g, or t
  misc_feature (958)..(958): n is a, c, g, or t
  misc_feature (966)..(966): n is a, c, g, or t
  misc_feature (982)..(982): n is a, c, g, or t
  misc_feature (1001)..(1001): n is a, c, g, or t
  misc_feature (1009)..(1010): n is a, c, g, or t
  misc_feature (1013)..(1013): n is a, c, g, or t
  misc_feature (1020)..(1020): n is a, c, g, or t
  misc_feature (1024)..(1025): n is a, c, g, or t
  misc_feature (1034)..(1035): n is a, c, g, or t
  misc_feature (1039)..(1039): n is a, c, g, or t
  misc_feature (1049)..(1049): n is a, c, g, or t
  misc_feature (1057)..(1057): n is a, c, g, or t
  misc_feature (1060)..(1060): n is a, c, g, or t
  misc_feature (1064)..(1065): n is a, c, g, or t
  misc_feature (1075)..(1075): n is a, c, g, or t
  misc_feature (1079)..(1079): n is a, c, g, or t
  misc_feature (1082)..(1082): n is a, c, g, or t
aagtcacattcctatcgcttccttagcgagggcnttgaagattaggggaccccctcacatatgcanaaacaagtacacacagccatgcacacacactcatgctcacactcatgctcacactcatgctcacactcatgctcacactcatgttcacagtcttacagtcatacatacacccccacacacacangcacacacatacacagagtcaggcatgtgacatanaaagtatggagtcaaccaagttaacttttgtnaacattaatcttgatgagcttcttgccttttgtctgcaaagcaaggatggtcgtgattaagnaagggcagaattttttcgagaattaatgnaattggnttaccaaancacttgggangcatcggnatccggtgttcatcttttnttgtttgaaaaggtttgtgctaactaanttantatttccgaggtcttaataagggcgatatgcaagggangcctttttccctcccattcagcaagttgangggaagctggttatgtgcaagaanggcanggtgncccgctgttgcccaccccataatgctnnaagcgatttgagttgnatccagggaacccatccaaaggatngattcacatcatatatttgcataatcccaaaagtatctcttcacangaatacctttctagctcaatggggttaangttgtaaanttgtagtggggagcctaattgtggtgaattgtgatctgcaaggtttgcctgtatgcctgggctnaaggagattctcctngcctcgattctccaaagtacctaagggactgtnttctggtncactggaacccttganggctaagcctnactttgncatttanttttccnccgggcaatgttcaagtgcgaaaccatgggcaaccttttgtgagtcccttttctccatcaacatggaggggtcncactgaacctaagggnctttacttcntngggaaaanccagttgttgtgcccncctaggggacatagtgggnctttaaannaancttcaanaatnntttatctgnntcancccatggtgncaatcatngtnaggnnttccatttancggnctngtccttttttttt

SEQ ID NO: 304 - DNA, 1042 bp, Artificial Sequence
  Description of Artificial Sequence: Note = Synthetic Construct
  misc_feature (3)..(3): n is a, c, g, or t
  misc_feature (5)..(5): n is a, c, g, or t
  misc_feature (19)..(19): n is a, c, g, or t
  misc_feature (21)..(21): n is a, c, g, or t
  misc_feature (31)..(31): n is a, c, g, or t
  misc_feature (45)..(45): n is a, c, g, or t
  misc_feature (72)..(72): n is a, c, g, or t
  misc_feature (311)..(311): n is a, c, g, or t
  misc_feature (504)..(504): n is a, c, g, or t
  misc_feature (581)..(581): n is a, c, g, or t
  misc_feature (583)..(583): n is a, c, g, or t
  misc_feature (599)..(599): n is a, c, g, or t
  misc_feature (605)..(605): n is a, c, g, or t
  misc_feature (619)..(619): n is a, c, g, or t
  misc_feature (715)..(715): n is a, c, g, or t
  misc_feature (734)..(734): n is a, c, g, or t
  misc_feature (741)..(741): n is a, c, g, or t
  misc_feature (747)..(748): n is a, c, g, or t
  misc_feature (751)..(751): n is a, c, g, or t
  misc_feature (762)..(762): n is a, c, g, or t
  misc_feature (799)..(799): n is a, c, g, or t
  misc_feature (808)..(808): n is a, c, g, or t
  misc_feature (878)..(878): n is a, c, g, or t
  misc_feature (887)..(887): n is a, c, g, or t
  misc_feature (899)..(899): n is a, c, g, or t
  misc_feature (923)..(923): n is a, c, g, or t
  misc_feature (928)..(928): n is a, c, g, or t
  misc_feature (971)..(972): n is a, c, g, or t
  misc_feature (982)..(982): n is a, c, g, or t
  misc_feature (985)..(985): n is a, c, g, or t
  misc_feature (1024)..(1024): n is a, c, g, or t
  misc_feature (1033)..(1034): n is a, c, g, or t
  misc_feature (1036)..(1036): n is a, c, g, or t
  misc_feature (1039)..(1039): n is a, c, g, or t
cantnacattctatcaggntnctaaattagnacaccagggatatngggccttctcatttgaactaatagcanaaagccaagatttcaccaagtgtgtttacagcatatatctcatgtaaaactataacaatacccaaacctcctttcccatcttatactctgattggcttaacccaacagaaagagaaaaagtagtggggggcctggctaataaagccattaggatcagtgtcctaggggacagaacaaaatgataaaggaggaaagaagactcagaaatatagacaccctccacatttgtcaccatcatnattggcattatcatatcatcccctctcaacatcatcattatcatcataatcagtatcatcatcatcataatcatcattaccattatcttcactattattaccatgatcatcaacatcagttgccatcatcaagcatataataatctatattccatgatcctttgaatttacaaaaattagtcctcataattcnattttatcatcctcagaattttttttgcaagtagctcctacatgtaccaaggtcctggcacataactagtccttggnanttcaacaaacgttgtncagtanctactatatctaanggtctgtgatagaaccatgagtggttgaagaatccaaattgtaagatgacaggagtcaataccataagcaagctacaaaatgttaaggtaggttgnttaagagaagaccctgganggatganggtgtnntancctgggttggncctgggtaagagaaactcctaaacatgggggggcaanaatggggcntgggtatggaacatagtggaggtacatttggagacatacctctcctttaagagggaagggacccatggangaaaacatncggaaagtggangaacagtttgttcgttggttgganatgcnttgggttttacaatccgttgagagtaaagtgttagaattggtnngggacccaanaanttggtggccaacgggaaatcctaaagtccggggggtttntcgggccanngnaancga

SEQ ID NO: 305 - DNA, 1012 bp, Artificial Sequence
  Description of Artificial Sequence: Note = Synthetic Construct
  misc_feature (10)..(10): n is a, c, g, or t
  misc_feature (18)..(18): n is a, c, g, or t
  misc_feature (30)..(31): n is a, c, g, or t
  misc_feature (33)..(33): n is a, c, g, or t
  misc_feature (44)..(44): n is a, c, g, or t
  misc_feature (61)..(61): n is a, c, g, or t
  misc_feature (309)..(309): n is a, c, g, or t
  misc_feature (349)..(349): n is a, c, g, or t
  misc_feature (459)..(459): n is a, c, g, or t
  misc_feature (482)..(482): n is a, c, g, or t
  misc_feature (510)..(510): n is a, c, g, or t
  misc_feature (518)..(518): n is a, c, g, or t
  misc_feature (563)..(563): n is a, c, g, or t
  misc_feature (567)..(567): n is a, c, g, or t
  misc_feature (572)..(572): n is a, c, g, or t
  misc_feature (592)..(592): n is a, c, g, or t
  misc_feature (607)..(607): n is a, c, g, or t
  misc_feature (612)..(613): n is a, c, g, or t
  misc_feature (671)..(672): n is a, c, g, or t
  misc_feature (676)..(677): n is a, c, g, or t
  misc_feature (682)..(682): n is a, c, g, or t
  misc_feature (686)..(686): n is a, c, g, or t
  misc_feature (692)..(692): n is a, c, g, or t
  misc_feature (712)..(712): n is a, c, g, or t
  misc_feature (736)..(736): n is a, c, g, or t
  misc_feature (742)..(742): n is a, c, g, or t
  misc_feature (779)..(779): n is a, c, g, or t
  misc_feature (835)..(835): n is a, c, g, or t
  misc_feature (845)..(845): n is a, c, g, or t
  misc_feature (852)..(852): n is a, c, g, or t
  misc_feature (865)..(865): n is a, c, g, or t
  misc_feature (884)..(884): n is a, c, g, or t
  misc_feature (889)..(889): n is a, c, g, or t
  misc_feature (906)..(906): n is a, c, g, or t
  misc_feature (925)..(925): n is a, c, g, or t
  misc_feature (962)..(963): n is a, c, g, or t
  misc_feature (965)..(965): n is a, c, g, or t
  misc_feature (969)..(970): n is a, c, g, or t
  misc_feature (972)..(973): n is a, c, g, or t
  misc_feature (976)..(976): n is a, c, g, or t
  misc_feature (985)..(985): n is a, c, g, or t
  misc_feature (988)..(988): n is a, c, g, or t
  misc_feature (996)..(997): n is a, c, g, or t
cattcacatntatcaggnctctggaagacnnanagtgttcttanccactgagccatacctnaagcccaatgtgtcattttttttttacagccatcctccatgatgagagagaggcagactcttctagccgctgcagctaggaaatgtctgtccatttctaacggttctaagttgcaatctccctgggtgagtgtgcacaggagagcctgtctgccgacatagcagcctcttccaagtaggtgcaatggtgcccttcactgtctatcctgggtctgtgggaccctaccaagagtagcagttaagtggganggttctggagccgggccgtcagagtttgaattttgactcntggctttgtgacttgggacagctggcttaacctctctgggcctttcttttctcctgacattgcaagacagttagcacacctccccggggacttgtgttgaagtacaaacnggaatataaacgtgtgaaatgcntgttgcaaaacctgggtacaaaagtttnggttttanctgtgcctgggcggccaaattccaaggcctttcggggccaacaanttantcaancccctgggaaaaccccttcnaaaaacctgacgggntgggnnccctgagggcaaaatttccctaaaaggggagcagcttcaggcatttacccaagggaanngtgnnccaangggncatgcntaagccccgggaaggcaaangggacaaggtttttcactaatggnttgcanggaagaaaaagttagggctgatgccttgatgccccantacgttagggaaaagcaacccaacctcccgtgttgtcctcacaaacctcaaaggancctgaaggcncttgaanttggggaagtggncctgaccaaaactgacacnggggntcaaaacttggggcccnccccaacttccaacccctnaaaaactttcctaaaccctccccttccttgcccttgnnangatnngnnatnacccccggnggngggggggnntaaggggaaaaaggg

SEQ ID NO: 306 - DNA, 1065 bp, Artificial Sequence
  Description of Artificial Sequence: Note = Synthetic Construct
  misc_feature (30)..(31): n is a, c, g, or t
  misc_feature (41)..(41): n is a, c, g, or t
  misc_feature (43)..(43): n is a, c, g, or t
  misc_feature (45)..(45): n is a, c, g, or t
  misc_feature (572)..(572): n is a, c, g, or t
  misc_feature (612)..(612): n is a, c, g, or t
  misc_feature (625)..(625): n is a, c, g, or t
  misc_feature (662)..(662): n is a, c, g, or t
  misc_feature (664)..(664): n is a, c, g, or t
  misc_feature (667)..(667): n is a, c, g, or t
  misc_feature (720)..(720): n is a, c, g, or t
  misc_feature (748)..(748): n is a, c, g, or t
  misc_feature (754)..(754): n is a, c, g, or t
  misc_feature (756)..(756): n is a, c, g, or t
  misc_feature (762)..(762): n is a, c, g, or t
  misc_feature (767)..(767): n is a, c, g, or t
  misc_feature (786)..(786): n is a, c, g, or t
  misc_feature (804)..(804): n is a, c, g, or t
  misc_feature (815)..(815): n is a, c, g, or t
  misc_feature (824)..(824): n is a, c, g, or t
  misc_feature (843)..(843): n is a, c, g, or t
  misc_feature (847)..(847): n is a, c, g, or t
  misc_feature (849)..(849): n is a, c, g, or t
  misc_feature (851)..(851): n is a, c, g, or t
  misc_feature (887)..(887): n is a, c, g, or t
  misc_feature (903)..(903): n is a, c, g, or t
  misc_feature (923)..(923): n is a, c, g, or t
  misc_feature (952)..(952): n is a, c, g, or t
  misc_feature (955)..(955): n is a, c, g, or t
  misc_feature (963)..(964): n is a, c, g, or t
  misc_feature (974)..(974): n is a, c, g, or t
  misc_feature (985)..(985): n is a, c, g, or t
  misc_feature (991)..(991): n is a, c, g, or t
  misc_feature (993)..(993): n is a, c, g, or t
  misc_feature (1001)..(1002): n is a, c, g, or t
  misc_feature (1018)..(1018): n is a, c, g, or t
  misc_feature (1021)..(1021): n is a, c, g, or t
  misc_feature (1030)..(1031): n is a, c, g, or t
  misc_feature (1035)..(1035): n is a, c, g, or t
  misc_feature (1047)..(1048): n is a, c, g, or t
  misc_feature (1055)..(1055): n is a, c, g, or t
catttactttaatcgcccaacttctagatnnaacataccangncngtcaaaactattccaaaaaatagaaacagatggagcactaccgaattcagttagttcccagtagcctgctcttgtacgatgtgtacttttaaagatttatcaaaatttggtgagccgaatctgagtaacatggtgaattcccagctctcccaactcttcccacctcccgctttccccaggaacactcccttagctcctcgtccatcaccaagtggagtttttttatttttatttttttaaaagtttaggtgcctttgcggatgacctcattttgatgttgaaaaaatgatttttttaatatgtggacgctgcaaaaaatgtgtttaaattatcttttttaagatgaattaaggactattagcccgaacttcgacgcagagtttgtaaataagggtgtctgtgcagatttccccacatttatttgtataaaatttctcatcttttcagacatttttgtaaaccgccccccaagttgtgaaaagctgcgacgtagcaatgacctcaagcaacccctaagttttcccccnttgaaaatttttctcaagttaaattaagctactgatttgnatttggtttttancctgtccctaaaaaaatccttggtcctgaaatgcaangnaanttgggggggttattattaatgaaagcaacaatactcctaaaggttgattttcnaatatgaaagaggattaatttaaataanataatngnttcaantgggntgtgggcttttcccttggnggcaagggttccatcggntcaaaaccttnaaccgggtnccccccccgggaatcgggntgancnanaacggcacaatttgaacctttccaaggccttaaaangcagcacaatgccaanaagggtaaccctgctccgtnaaagggtcaaagttcctccaaccccccgnccnaattcgcnncgcggttctnaaaccaaaggnggggtnancaatcaannccggggggtcaaactncgnccgcctggnncctngggccgggccanngcccccnccggggggtt

SEQ ID NO: 307 - DNA, 1027 bp, Artificial Sequence
  Description of Artificial Sequence: Note = Synthetic Construct
  misc_feature (4)..(4): n is a, c, g, or t
  misc_feature (12)..(12): n is a, c, g, or t
  misc_feature (38)..(38): n is a, c, g, or t
  misc_feature (57)..(57): n is a, c, g, or t
  misc_feature (324)..(324): n is a, c, g, or t
  misc_feature (473)..(473): n is a, c, g, or t
  misc_feature (642)..(642): n is a, c, g, or t
  misc_feature (650)..(650): n is a, c, g, or t
  misc_feature (656)..(656): n is a, c, g, or t
  misc_feature (660)..(660): n is a, c, g, or t
  misc_feature (677)..(677): n is a, c, g, or t
  misc_feature (685)..(685): n is a, c, g, or t
  misc_feature (705)..(705): n is a, c, g, or t
  misc_feature (749)..(749): n is a, c, g, or t
  misc_feature (767)..(767): n is a, c, g, or t
  misc_feature (784)..(784): n is a, c, g, or t
  misc_feature (787)..(787): n is a, c, g, or t
  misc_feature (837)..(837): n is a, c, g, or t
  misc_feature (846)..(846): n is a, c, g, or t
  misc_feature (849)..(849): n is a, c, g, or t
  misc_feature (855)..(855): n is a, c, g, or t
  misc_feature (870)..(870): n is a, c, g, or t
  misc_feature (872)..(872): n is a, c, g, or t
  misc_feature (874)..(874): n is a, c, g, or t
  misc_feature (886)..(887): n is a, c, g, or t
  misc_feature (892)..(892): n is a, c, g, or t
  misc_feature (898)..(898): n is a, c, g, or t
  misc_feature (900)..(900): n is a, c, g, or t
  misc_feature (906)..(906): n is a, c, g, or t
  misc_feature (909)..(909): n is a, c, g, or t
  misc_feature (957)..(957): n is a, c, g, or t
  misc_feature (960)..(960): n is a, c, g, or t
  misc_feature (963)..(964): n is a, c, g, or t
  misc_feature (987)..(987): n is a, c, g, or t
  misc_feature (989)..(989): n is a, c, g, or t
  misc_feature (993)..(993): n is a, c, g, or t
  misc_feature (1001)..(1001): n is a, c, g, or t
  misc_feature (1009)..(1010): n is a, c, g, or t
  misc_feature (1012)..(1012): n is a, c, g, or t
  misc_feature (1015)..(1015): n is a, c, g, or t
tttncatttacntttaattcaggcccattaagactacnaatcagaattggggaatangattaacttcagaaccttctggaggtcttcatcttaaaatgacggttactgggattagaaaagcctatcagcattccaactattcaatctccctggtcagagatgaggaagatgtgtccgactcaggtgtagctcatgagaacacagagcccaggatggtgcaccttccattcaggtgctctcctccaagcctcaggggcaaccagcgcggctcagtgaccaatcaagaaaagagacagaatcggtccgagggtgccgcggcggatnacccggtccctccgaggccgcgcgaccttagtgtccctgcagggctacatccctcttcacccggggctgcggcgacgcccttgccctccctcctgtccgtccgtctgtccattcgcccgtcctacctgctggcgcaaggactctggcanccccgggcgctcgcggtggactccacggggctacaagcgcccaaccttcgctgctacaagttacctgcgcccagtcaagcgtcagtgggcacgttgaccccgcctctaaaaaccttgcccccgcccttaagcctgcccccaaaagtcgccccacctactaaaagtgtcnctggcgcnatgacnttcnacgaccaaggcgcaatnagtaggcnacctgggacggccctggttntgtcgggggcggaactctgctggcttttaccgccttcaaacaantaggttccttgggctccncggcgttcggaaataanggngggaggacaaagaaaacaaggattctccaattcttttgaccgaacccaantcccgcaanccnttttanggccgtttttccggntntncccgggcatcanncattnatcaangntttacngtntgggaaacttaccgtcaaaacctgggtttttccagggacctttttggnggnttnnaccaaggggatttcaattttaanancccncctttggntttggaanntnctngggttttttccc

SEQ ID NO: 308 - DNA, 761 bp, Artificial Sequence; identical to SEQ ID NO: 268
  Description of Artificial Sequence: Note = Synthetic Construct

SEQ ID NO: 309 - DNA, 787 bp, Artificial Sequence
  Description of Artificial Sequence: Note = Synthetic Construct
  misc_feature (436)..(436): n is a, c, g, or t
  misc_feature (496)..(496): n is a, c, g, or t
ctcgtgccgaaaaggtctcttattgataagcaagttggacactgatttaaatagttgtaaactcttcttatacattatccttcatcctaaacctaagtcagttttttaaatttaaatttattattattatttttttacttattcactttacatcccgctcactgtttcccccgcccagtcaccacctctgacaatccttcctccttccctctccccttctccactgtggggatggggcccccttgggtatttcccctcaccctggcacttcaagtctctgccaggctaggcactttctcttccactgaagccagacaaggcagcccagctagtagaacatatccctcatccaggcaacagcttttgggatagccccagctccagttgttcaggacccacatgaaagtcaagctgcacatctgtacatatgaccagngagacttagatccagcctgtgtatgttctatggttggtggttcagactctcagagcccanagtgagcccagggtccaggttagttgactctgttggtctttctgtggagtttctatctcccctctggacccacaatccttcctcctattcttctgtaagaatttccaagctccttggaaatccttgggaccgagggtgttgatgccccagtgtacaggaatgccggggtgggtgggtaggggagcaccttcatagaggcaggaggaggggggatgggatagggggtttcctcaggggagacctggaaaggggaaaacatttgaaatgtaaataaaagatctaataaaaaaa

SEQ ID NO: 310 - DNA, 767 bp, Artificial Sequence
  Description of Artificial Sequence: Note = Synthetic Construct
  misc_feature (30)..(30): n is a, c, g, or t
  misc_feature (35)..(36): n is a, c, g, or t
  misc_feature (52)..(52): n is a, c, g, or t
  misc_feature (55)..(56): n is a, c, g, or t
  misc_feature (88)..(88): n is a, c, g, or t
  misc_feature (95)..(95): n is a, c, g, or t
  misc_feature (97)..(97): n is a, c, g, or t
  misc_feature (105)..(105): n is a, c, g, or t
  misc_feature (124)..(124): n is a, c, g, or t
  misc_feature (147)..(147): n is a, c, g, or t
  misc_feature (154)..(154): n is a, c, g, or t
  misc_feature (156)..(156): n is a, c, g, or t
  misc_feature (165)..(165): n is a, c, g, or t
  misc_feature (188)..(188): n is a, c, g, or t
  misc_feature (209)..(209): n is a, c, g, or t
  misc_feature (220)..(220): n is a, c, g, or t
  misc_feature (304)..(304): n is a, c, g, or t
  misc_feature (650)..(650): n is a, c, g, or t
  misc_feature (664)..(665): n is a, c, g, or t
  misc_feature (676)..(677): n is a, c, g, or t
  misc_feature (683)..(683): n is a, c, g, or t
  misc_feature (690)..(690): n is a, c, g, or t
  misc_feature (697)..(697): n is a, c, g, or t
  misc_feature (709)..(709): n is a, c, g, or t
  misc_feature (715)..(715): n is a, c, g, or t
  misc_feature (717)..(717): n is a, c, g, or t
  misc_feature (731)..(732): n is a, c, g, or t
  misc_feature (735)..(735): n is a, c, g, or t
  misc_feature (737)..(737): n is a, c, g, or t
  misc_feature (749)..(749): n is a, c, g, or t
  misc_feature (752)..(752): n is a, c, g, or t
  misc_feature (760)..(760): n is a, c, g, or t
cagtccattttgggcctgtgcttggtgcgntccgnncggtccctgtagttgnagnncgggcggtcgcgcggcctttcccactagccgnaggtcgnanataagtanccgccgcccggctcctctngggaaagcggggtggtcctcganccttcancnagggtgggnagttgcccaggtcagcagggatntgcgtgggttgggggggctgncgaaggccgtntgagctccagtccggcagcgcggcagaaaccagcggggcactgtcatgggcctggggaggagcggcctgcggagggcgccgggncagtgtgtctgtggtccagaaaacctgctccgtccggagccttcctggccccgctaccagcgtctccacatcccctagaaaagaaaagacgggtgtgggccttaggttacagcgcgccgccagcgtttggttgcatggcgccgggggagggcgccctaaccgagaagctgcttaatacaaagagctccaggctcctggcggttcaccaggtctaaacagccgggctttatttgtgggggcgattgaaaaaattgagggtcaagattggggtgctgtgcaaataaatgcgttaatactgttctttttcttctttctttgcagtagcctctagttcgttagtcaaaangaaaaagggttttnntttgggggggnncaaaanttggagnaaggttnaaaaaccctttnttttantnaaaaagggaagggnnctntntaagtttatgcnagngggatccncagaaag

SEQ ID NO: 311 - DNA, 626 bp, Artificial Sequence
  Description of Artificial Sequence: Note = Synthetic Construct
  misc_feature (6)..(6): n is a, c, g, or t
  misc_feature (29)..(29): n is a, c, g, or t
  misc_feature (31)..(31): n is a, c, g, or t
  misc_feature (43)..(43): n is a, c, g, or t
  misc_feature (48)..(48): n is a, c, g, or t
  misc_feature (99)..(99): n is a, c, g, or t
  misc_feature (129)..(129): n is a, c, g, or t
  misc_feature (131)..(131): n is a, c, g, or t
  misc_feature (143)..(143): n is a, c, g, or t
  misc_feature (149)..(149): n is a, c, g, or t
  misc_feature (178)..(178): n is a, c, g, or t
  misc_feature (508)..(508): n is a, c, g, or t
  misc_feature (522)..(522): n is a, c, g, or t
  misc_feature (586)..(587): n is a, c, g, or t
  misc_feature (589)..(589): n is a, c, g, or t
  misc_feature (598)..(598): n is a, c, g, or t
  misc_feature (600)..(600): n is a, c, g, or t
  misc_feature (602)..(602): n is a, c, g, or t
  misc_feature (609)..(609): n is a, c, g, or t
  misc_feature (618)..(618): n is a, c, g, or t
  misc_feature (623)..(623): n is a, c, g, or t
tttttntccccctccccccacggaattcntntgacgttgggangaagngaccccgcctttagtcgcgaccgggcccggcctcctcccgtaacgcgggcnacgtgcttcagacgcggccccgccccggtntntgttccgttggngtggtnggatcttcctggtgtccggggagctgacngaggtccccagcaaggccccctcccctaactttatttcccctcaccggcagagccaccaggcctgtcccctcttgtattgccataaaccccattttttatgatagggtctcgctccgtcgcccacgctggagtgcaggggcgcgatcacggctcactgcaacctcgaaatccggggctcaagcgagccttccgccttggcctccccaagtgctgggattacaggtgtgagccaccacacacggcctccatttcaaacttagtttccacccggacctcaactcgaaatcccccatcagccgggcagaaaggtcctggagcacttttggggngtccgccgcgtttntaaacgacgctagcttcgcttttatttcttttcccccctttggcgatatggtcatgggggcccnnanaatgggggngnanattcaangaagatctnagttntcg

SEQ ID NO: 312 - DNA, 974 bp, Artificial Sequence
  Description of Artificial Sequence: Note = Synthetic Construct
  misc_feature (6)..(6): n is a, c, g, or t
  misc_feature (9)..(9): n is a, c, g, or t
  misc_feature (16)..(16): n is a, c, g, or t
  misc_feature (29)..(29): n is a, c, g, or t
  misc_feature (44)..(44): n is a, c, g, or t
  misc_feature (92)..(92): n is a, c, g, or t
  misc_feature (112)..(112): n is a, c, g, or t
  misc_feature (147)..(147): n is a, c, g, or t
  misc_feature (243)..(243): n is a, c, g, or t
  misc_feature (258)..(258): n is a, c, g, or t
  misc_feature (265)..(265): n is a, c, g, or t
  misc_feature (878)..(878): n is a, c, g, or t
  misc_feature (949)..(949): n is a, c, g, or t
  misc_feature (954)..(954): n is a, c, g, or t
  misc_feature (966)..(966): n is a, c, g, or t
  misc_feature (970)..(970): n is a, c, g, or t
taagcngtnggcacangcaatttcttttnccaaaaccaaaaccnacaaaaaaccctaaactattagcgggctggggtggctccgagtcctancttcagcggttagaggaggnccttgactcggagtcaaggtacagtgagtacgttnagccactgcattcagctggatgaaaagcaaaaacttgtctaaaagtctaaaaaaaaaaattaagaaatgctcatgatttatccgaaagaaatatcncattgaaaagaaagnagagccntgttcaagatgtcacaataagcgcctgtatttagctctacctacctccctaagccccatcaagatgataacaaagataccctgaaaagaattgattgataacaacattaacaagggaggtgtcattagcagataagaaatttcaaaaatttctagaagccaaaagcagagacattggcagaataaatggaaactactaaagcccagatgtaaatatcataaaccttgacagtgatggatgatgaagctgagagaagtctgaagaaatggaaggagtgtgtaggtgttctaacatccacaaagcacacagcagggtaccagtattttctgggtaaggttgatggggcaagatggaattttagtattttatataaggttattaatgtaaccactaaaataactaaacataaaccactaaattcttcaacttatcaaggagttgatagatactatctaatgctgagaaatcaagaaacgatttatagttgcagggataaccaccaaaagtactaaaactaggcatggttacaaagtgtttacttctgcaatatgaaataaacagtggtaatggacaaaggcagtttcactcttcattttttaccttctgcactgtncaatttttttaaaacaagtgcattgaacattttaataataaatacatagtgaaagaccccacctgtaggtngggcnttccaaagagantagnaggg

SEQ ID NO: 313 - DNA, 1088 bp, Artificial Sequence
  Description of Artificial Sequence: Note = Synthetic Construct
  misc_feature (1)..(1): n is a, c, g, or t
  misc_feature (6)..(6): n is a, c, g, or t
  misc_feature (12)..(12): n is a, c, g, or t
  misc_feature (19)..(19): n is a, c, g, or t
  misc_feature (22)..(22): n is a, c, g, or t
  misc_feature (31)..(31): n is a, c, g, or t
  misc_feature (52)..(52): n is a, c, g, or t
  misc_feature (61)..(61): n is a, c, g, or t
  misc_feature (65)..(66): n is a, c, g, or t
  misc_feature (76)..(77): n is a, c, g, or t
  misc_feature (83)..(84): n is a, c, g, or t
  misc_feature (88)..(88): n is a, c, g, or t
  misc_feature (93)..(93): n is a, c, g, or t
  misc_feature (111)..(111): n is a, c, g, or t
  misc_feature (120)..(120): n is a, c, g, or t
  misc_feature (130)..(131): n is a, c, g, or t
  misc_feature (137)..(137): n is a, c, g, or t
  misc_feature (150)..(150): n is a, c, g, or t
  misc_feature (160)..(160): n is a, c, g, or t
  misc_feature (180)..(180): n is a, c, g, or t
  misc_feature (199)..(199): n is a, c, g, or t
  misc_feature (209)..(209): n is a, c, g, or t
  misc_feature (241)..(241): n is a, c, g, or t
  misc_feature (251)..(251): n is a, c, g, or t
  misc_feature (263)..(263): n is a, c, g, or t
  misc_feature (272)..(272): n is a, c, g, or t
  misc_feature (288)..(288): n is a, c, g, or t
  misc_feature (290)..(290): n is a, c, g, or t
  misc_feature (398)..(398): n is a, c, g, or t
  misc_feature (415)..(415): n is a, c, g, or t
  misc_feature (423)..(423): n is a, c, g, or t
  misc_feature (995)..(995): n is a, c, g, or t
  misc_feature (1046)..(1046): n is a, c, g, or t
  misc_feature (1051)..(1051): n is a, c, g, or t
  misc_feature (1063)..(1063): n is a, c, g, or t
  misc_feature (1067)..(1067): n is a, c, g, or t
  misc_feature (1069)..(1069): n is a, c, g, or t
  misc_feature (1072)..(1072): n is a, c, g, or t
nggccnaaaaanccgccanccnaccataaantgtcccggggaatgggacctncccaaattnattnnattttttttnnccaagnncctntcctnagccaatggttggtattntttcccccnattaaaaaanngaaagnaattttggggatnccccttggtnccaaaaataagccaaacttncaaaaaaccattattgttntgggacaaangattaggccccccccggcccaaaatttttatnttttttcccntttttatttccnacctttccnagaaaaggccaaagcntntacccccttaaaaataaattaatttaatttgtgcctttggttgggggaatggggattagaagtttaatgtacataagaaatcccagtggaggaatgaaaatgttcttncagctgagtcatggtgncagccacncaatttgggttaaaaaaaaaaaaaacttatgaattgtcacttgaaaagatgaatcataccttttgcacgagcacaaactattccccatccctcaccaaagataactttttgcgtgtaaatttataggagagttgtcaaaaaataaactatggtggtatctaaagaaggtttccaccataaaaaagggggtctgaggggatcaattttgtcacaataaattcaagtgtgtctgagtacgctttgaaggtcactaaactgctagaacacatcaacctaagaaagtaagatctcttactcttagactacatcaaatcctagacgtgaaggaaaaacaggtacagaacttttggtaatcatcccaacctctctactccaggaatagcaaataggtttcactcacactgaaacttctggctccctaaagatgggaaaattatgaaactgccctatggctaagcaagaaagtatgccatgacctgatgtcgcaacaagcataggagagggaatgcacatgagatcatgtatttgccatccctgctctagcccactctatacttagctaagagcacagntatacaaacagcccccttcacctctacagagaaaagacaaaggtgagattnaaagncccgacctgtgnaagngnttnatgtgagatcatgtcc

SEQ ID NO: 314 - DNA, 363 bp, Artificial Sequence
  Description of Artificial Sequence: Note = Synthetic Construct
taaccactgcgacggtggaggaatgaaaatgttctacagctgagtcatggtgacagccacactagattgggttaaaaaaaaaaaaaactatgaatggtacacttgaaaagatgaatcatacctttggcacgagcacaaactatcccccatccctcaccaaagataacttttggcgtgtaaatttataggagagttgtcaaaaaataaactatggtggtatctaaagaaggttcccaccataaaaaagggggtctgaggggatcaatttggtcacaataaattcaagtgtgtctgagtacgctttgaaggtcactaaactgctagaacacatcaacctaaatcaacctaagaaagtaagatctc

SEQ ID NO: 315 - DNA, 968 bp, Artificial Sequence
  Description of Artificial Sequence: Note = Synthetic Construct
  misc_feature (3)..(3): n is a, c, g, or t
  misc_feature (14)..(14): n is a, c, g, or t
  misc_feature (22)..(23): n is a, c, g, or t
  misc_feature (26)..(26): n is a, c, g, or t
  misc_feature (35)..(35): n is a, c, g, or t
  misc_feature (50)..(50): n is a, c, g, or t
  misc_feature (52)..(52): n is a, c, g, or t
  misc_feature (62)..(62): n is a, c, g, or t
  misc_feature (93)..(93): n is a, c, g, or t
  misc_feature (112)..(112): n is a, c, g, or t
  misc_feature (120)..(120): n is a, c, g, or t
  misc_feature (128)..(128): n is a, c, g, or t
  misc_feature (143)..(143): n is a, c, g, or t
  misc_feature (154)..(154): n is a, c, g, or t
  misc_feature (156)..(156): n is a, c, g, or t
  misc_feature (184)..(184): n is a, c, g, or t
  misc_feature (210)..(210): n is a, c, g, or t
  misc_feature (220)..(220): n is a, c, g, or t
  misc_feature (226)..(226): n is a, c, g, or t
  misc_feature (356)..(356): n is a, c, g, or t
cgngcaaattttanataagcannttnacccaggcngggatccaggtttcntnggcctgcaangctgcctctgagctgggttttatttagtaanacaaagtcccccataaatntgaagagngtgagccncctgccccatggttntggttaatccngntgcagtatcatcatatcttttacagccnaggtcaggtcaccatgttcagtggtntagtgttccntgcctntctttactcaacatttttcagtctgttgtagcagtgagcacgaggggagaaggtgggcaacttaggtcaggtttaaaacacaagaaaggtcttatccaaagttaatgcacctatgcaatgggactttgcngtcagcagggggcgccagcaacagctccatcattttatgccccgtcatccctgtgagggctggcaatgttgcacttaactttgaggtggtttgtgaacttctcttgatttcctcatgcctgatagttgcaaaagcagtaataacagtgacagtggtaatgagaaacttactaccagcatcattgaaatccagtttccatgtgaaacttaggtttttcccactcacatacacctgggttatttgtgtagtgccacttcaaaccttaggagcatatgggctcacagtcacctttggaagagacctggccagtctgtaagtagagggatgtctgtgccagccgtctctactcctggctgttcagaggtaatacaaagtgaaacccataagaagcccccaggctatttgctggagacagattcaactgccagcaccctcagagacagagtctcattttttagcctgggctcacagcataagcagctcctcagctgatttccagaatcagtgcaacattcccaaagggagtcacttgtatcccagttctcaagataggtgagttctcaaggtactgaaagaccccacctgtaggttggcaagctaaatgggttcaaa

SEQ ID NO: 316 - DNA, 154 bp, Artificial Sequence
  Description of Artificial Sequence: Note = Synthetic Construct
  misc_feature (116)..(116): n is a, c, g, or t
  misc_feature (132)..(132): n is a, c, g, or t
  misc_feature (136)..(137): n is a, c, g, or t
  misc_feature (145)..(145): n is a, c, g, or t
  misc_feature (152)..(153): n is a, c, g, or t
tactgggaattcccaatgccaacacattgcttggcatgcagcggatacccaagaaaggcaggcaggcagggaacaaaatattgtctgggaagcagacttaaagcaaacctgtgaangaccccaccagggggncaanncaatgggntcagatnnc

SEQ ID NO: 317 - DNA, 1003 bp, Artificial Sequence
  Description of Artificial Sequence: Note = Synthetic Construct
  misc_feature (10)..(10): n is a, c, g, or t
  misc_feature (14)..(14): n is a, c, g, or t
  misc_feature (16)..(16): n is a, c, g, or t
  misc_feature (29)..(29): n is a, c, g, or t
  misc_feature (42)..(42): n is a, c, g, or t
  misc_feature (51)..(51): n is a, c, g, or t
  misc_feature (62)..(63): n is a, c, g, or t
  misc_feature (86)..(86): n is a, c, g, or t
  misc_feature (89)..(89): n is a, c, g, or t
  misc_feature (117)..(117): n is a, c, g, or t
  misc_feature (127)..(127): n is a, c, g, or t
  misc_feature (141)..(141): n is a, c, g, or t
  misc_feature (156)..(156): n is a, c, g, or t
  misc_feature (172)..(172): n is a, c, g, or t
  misc_feature (194)..(194): n is a, c, g, or t
  misc_feature (222)..(222): n is a, c, g, or t
  misc_feature (225)..(225): n is a, c, g, or t
  misc_feature (237)..(237): n is a, c, g, or t
  misc_feature (246)..(246): n is a, c, g, or t
  misc_feature (254)..(254): n is a, c, g, or t
  misc_feature (257)..(257): n is a, c, g, or t
  misc_feature (261)..(261): n is a, c, g, or t
  misc_feature (270)..(270): n is a, c, g, or t
  misc_feature (287)..(288): n is a, c, g, or t
  misc_feature (293)..(293): n is a, c, g, or t
  misc_feature (308)..(308): n is a, c, g, or t
  misc_feature (340)..(340): n is a, c, g, or t
  misc_feature (366)..(366): n is a, c, g, or t
  misc_feature (372)..(372): n is a, c, g, or t
  misc_feature (415)..(415): n is a, c, g, or t
  misc_feature (536)..(536): n is a, c, g, or t
actggggaanaagncncacctggtgaccncaaaattgaaagnggcagcctntttttgggatnnaaaaagccacaattttaatcccnctnaaattgggaaagggtttaaaaactcccntaagtgttanaaaggatttccccnggtttgtccaaggancgagtttatttgggtngaccctttcctgccttttgtcntccaaaaaattagggggaaaagtccagnccnaagccattcccntccaggggntgcaagtnccnatcnataatcagntagaaagttttgccttnnggtcntgggtccaagccccngttcctggggtttaggttttgagtttaggctnccacaccatgaggtgtcggtgggcantacccntgttaagcttcggcccccggcattccttgtccccaagccccangttgcaccccccccccccgccagtcacccgcttgatttttccctgcagccagtgcctgggtttgggattcctgcagcagcgcccagcggtctgtccagggccccttcccacagcccagctntcagctgtagaggatttgtcctaggtagggccccttcccacagcccagctgtaggggatttcttctcctaggtagggccccttcgcacagcccagctgtagggatttgatttcttctcctaggtagggccccttcccacagcccacctgtcagctgtaggggatttctcctaggtagggctccttcccacagcccagctgtgggggatttcttctcctaggtagtgccccttcgcacagcccagctgtaggggatttgatttcttctcctaggtagggccccttcccacagcccacctgtcagctgtaggggatttctcctaggtagggctccttcccacagcccagctgtaggggatttcttctcctaggtagtgccccttcgcacagcccagctgtaggggatttgatttcttctcctaggtagtgaaagaccccacctgtaggtgggcagcaaaggggtttaaa

SEQ ID NO: 318 - DNA, 822 bp, Artificial Sequence; identical to SEQ ID NO: 57
  Description of Artificial Sequence: Note = Synthetic Construct
  misc_feature (8)..(8): n is a, c, g, or t
  misc_feature (16)..(16): n is a, c, g, or t
  misc_feature (19)..(19): n is a, c, g, or t
  misc_feature (32)..(32): n is a, c, g, or t
  misc_feature (36)..(36): n is a, c, g, or t
  misc_feature (51)..(51): n is a, c, g, or t
  misc_feature (55)..(55): n is a, c, g, or t
  misc_feature (66)..(66): n is a, c, g, or t
  misc_feature (79)..(80): n is a, c, g, or t
  misc_feature (82)..(82): n is a, c, g, or t
  misc_feature (93)..(93): n is a, c, g, or t
  misc_feature (109)..(111): n is a, c, g, or t
  misc_feature (113)..(113): n is a, c, g, or t
  misc_feature (120)..(120): n is a, c, g, or t
  misc_feature (137)..(137): n is a, c, g, or t
  misc_feature (144)..(144): n is a, c, g, or t
  misc_feature (147)..(147): n is a, c, g, or t
  misc_feature (149)..(149): n is a, c, g, or t
  misc_feature (151)..(151): n is a, c, g, or t
  misc_feature (165)..(165): n is a, c, g, or t
  misc_feature (187)..(187): n is a, c, g, or t
  misc_feature (198)..(198): n is a, c, g, or t
  misc_feature (204)..(204): n is a, c, g, or t
  misc_feature (220)..(220): n is a, c, g, or t
  misc_feature (229)..(229): n is a, c, g, or t
  misc_feature (234)..(235): n is a, c, g, or t
  misc_feature (249)..(249): n is a, c, g, or t
  misc_feature (251)..(252): n is a, c, g, or t
  misc_feature (266)..(266): n is a, c, g, or t
  misc_feature (277)..(277): n is a, c, g, or t
  misc_feature (298)..(298): n is a, c, g, or t
  misc_feature (301)..(301): n is a, c, g, or t
  misc_feature (306)..(306): n is a, c, g, or t
  misc_feature (318)..(318): n is a, c, g, or t
  misc_feature (324)..(327): n is a, c, g, or t
  misc_feature (329)..(329): n is a, c, g, or t
  misc_feature (338)..(338): n is a, c, g, or t
  misc_feature (356)..(357): n is a, c, g, or t
  misc_feature (367)..(367): n is a, c, g, or t
  misc_feature (371)..(371): n is a, c, g, or t
  misc_feature (376)..(376): n is a, c, g, or t
  misc_feature (388)..(388): n is a, c, g, or t
  misc_feature (395)..(395): n is a, c, g, or t
  misc_feature (402)..(402): n is a, c, g, or t
  misc_feature (410)..(411): n is a, c, g, or t
  misc_feature (419)..(419): n is a, c, g, or t
  misc_feature (433)..(433): n is a, c, g, or t
  misc_feature (435)..(437): n is a, c, g, or t
  misc_feature (441)..(441): n is a, c, g, or t
  misc_feature (455)..(455): n is a, c, g, or t
  misc_feature (457)..(457): n is a, c, g, or t
  misc_feature (460)..(460): n is a, c, g, or t
  misc_feature (464)..(464): n is a, c, g, or t
  misc_feature (468)..(468): n is a, c, g, or t
  misc_feature (472)..(472): n is a, c, g, or t
  misc_feature (504)..(504): n is a, c, g, or t
  misc_feature (510)..(510): n is a, c, g, or t
  misc_feature (512)..(512): n is a, c, g, or t
  misc_feature (531)..(531): n is a, c, g, or t
  misc_feature (539)..(539): n is a, c, g, or t
  misc_feature (543)..(543): n is a, c, g, or t
  misc_feature (568)..(568): n is a, c, g, or t
  misc_feature (570)..(570): n is a, c, g, or t
  misc_feature (596)..(596): n is a, c, g, or t
  misc_feature (602)..(603): n is a, c, g, or t
  misc_feature (608)..(608): n is a, c, g, or t
  misc_feature (620)..(620): n is a, c, g, or t
  misc_feature (630)..(631): n is a, c, g, or t
  misc_feature (634)..(634): n is a, c, g, or t
  misc_feature (640)..(640): n is a, c, g, or t
  misc_feature (643)..(643): n is a, c, g, or t
  misc_feature (658)..(658): n is a, c, g, or t
  misc_feature (662)..(662): n is a, c, g, or t
  misc_feature (665)..(665): n is a, c, g, or t
  misc_feature (668)..(668): n is a, c, g, or t
  misc_feature (672)..(672): n is a, c, g, or t
  misc_feature (674)..(674): n is a, c, g, or t
  misc_feature (678)..(678): n is a, c, g, or t
  misc_feature (685)..(686): n is a, c, g, or t
  misc_feature (692)..(692): n is a, c, g, or t
  misc_feature (711)..(711): n is a, c, g, or t
  misc_feature (718)..(718): n is a, c, g, or t
  misc_feature (732)..(732): n is a, c, g, or t
  misc_feature (736)..(737): n is a, c, g, or t
  misc_feature (746)..(746): n is a, c, g, or t
  misc_feature (783)..(783): n is a, c, g, or t
  misc_feature (792)..(792): n is a, c, g, or t
  misc_feature (795)..(795): n is a, c, g, or t
  misc_feature (797)..(797): n is a, c, g, or t
  misc_feature (799)..(799): n is a, c, g, or t
  misc_feature (802)..(802): n is a, c, g, or t
  misc_feature (808)..(808): n is a, c, g, or t

SEQ ID NO: 319 - DNA, 513 bp, Artificial Sequence
  Description of Artificial Sequence: Note = Synthetic Construct
  misc_feature (29)..(29): n is a, c, g, or t
  misc_feature (40)..(40): n is a, c, g, or t
  misc_feature (44)..(44): n is a, c, g, or t
  misc_feature (51)..(51): n is a, c, g, or t
  misc_feature (60)..(60): n is a, c, g, or t
  misc_feature (80)..(80): n is a, c, g, or t
  misc_feature (95)..(95): n is a, c, g, or t
  misc_feature (104)..(104): n is a, c, g, or t
  misc_feature (111)..(111): n is a, c, g, or t
  misc_feature (129)..(129): n is a, c, g, or t
  misc_feature (132)..(132): n is a, c, g, or t
  misc_feature (134)..(134): n is a, c, g, or t
  misc_feature (147)..(147): n is a, c, g, or t
  misc_feature (188)..(188): n is a, c, g, or t
  misc_feature (190)..(190): n is a, c, g, or t
  misc_feature (197)..(197): n is a, c, g, or t
  misc_feature (218)..(218): n is a, c, g, or t
  misc_feature (237)..(237): n is a, c, g, or t
  misc_feature (264)..(264): n is a, c, g, or t
  misc_feature (302)..(302): n is a, c, g, or t
  misc_feature (325)..(325): n is a, c, g, or t
  misc_feature (337)..(337): n is a, c, g, or t
  misc_feature (354)..(354): n is a, c, g, or t
  misc_feature (365)..(365): n is a, c, g, or t
  misc_feature (369)..(369): n is a, c, g, or t
  misc_feature (396)..(396): n is a, c, g, or t
  misc_feature (405)..(405): n is a, c, g, or t
  misc_feature (432)..(432): n is a, c, g, or t
  misc_feature (443)..(444): n is a, c, g, or t
  misc_feature (446)..(447): n is a, c, g, or t
  misc_feature (462)..(464): n is a, c, g, or t
  misc_feature (466)..(466): n is a, c, g, or t
  misc_feature (471)..(474): n is a, c, g, or t
  misc_feature (480)..(482): n is a, c, g, or t
  misc_feature (500)..(500): n is a, c, g, or t
atcttcgtcgtggacccaatggcgaatgnccttgctttgnccgnaatattnatggggggnaaaaatgggcccgctttttnttgggatttcaatcnacttgtggncccggcnttggttgttgggcggganccncnttttcaaggaaanatagcggttgggcttacccccgggaaaattgcttgaaaaancnttgggcnggcaaaatgggcttgaccccntttcttcgggccttttacnggaattggcccgtttcccgaatttggnaagggcaattggcctttttattggccttttttttgacnaagttttttttgaaccgggaaantttgggggttgnaaaagaagcttaccccnttaaataaacncccntttttcaaggggttgggaaaaaaaccntaacttggnaaataaaaaaatttaaaatcggggtcnggaaccaaatnngnnaaaaaaggggccggnnnanccggnnnncctttnnnaaccccaaaagtttttcngggggccccagga

SEQ ID NO: 320 - DNA, 928 bp, Artificial Sequence
  Description of Artificial Sequence: Note = Synthetic Construct
  misc_feature (711)..(711): n is a, c, g, or t
  misc_feature (720)..(720): n is a, c, g, or t
  misc_feature (723)..(723): n is a, c, g, or t
  misc_feature (745)..(745): n is a, c, g, or t
  misc_feature (747)..(747): n is a, c, g, or t
  misc_feature (752)..(752): n is a, c, g, or t
  misc_feature (769)..(769): n is a, c, g, or t
  misc_feature (778)..(779): n is a, c, g, or t
  misc_feature (786)..(787): n is a, c, g, or t
  misc_feature (826)..(826): n is a, c, g, or t
  misc_feature (833)..(833): n is a, c, g, or t
  misc_feature (844)..(844): n is a, c, g, or t
  misc_feature (853)..(853): n is a, c, g, or t
  misc_feature (856)..(856): n is a, c, g, or t
  misc_feature (867)..(867): n is a, c, g, or t
  misc_feature (872)..(872): n is a, c, g, or t
  misc_feature (884)..(885): n is a, c, g, or t
  misc_feature (890)..(890): n is a, c, g, or t
  misc_feature (896)..(896): n is a, c, g, or t
  misc_feature (898)..(898): n is a, c, g, or t
  misc_feature (901)..(901): n is a, c, g, or t
  misc_feature (903)..(903): n is a, c, g, or t
  misc_feature (924)..(924): n is a, c, g, or t
cgggctgaggaattctgcatttattcaatttagtgggtggtcaacacaacctctgctaactggcccttccagcacacacacactgaaagacccccgctgacgggtagtcaatcactcagaggagaccctcccaaggaacagcgagaccacaagtcggatgcaactgcaagagggtttattggatacacgggtacccgggcgactcagtcaatcggaggactggcgccccgagtgaggggttgtgggctcttttattgagctcggggagcagaagcgcgcgaacagaagcgagaagcgaactgattggttagttcaaataaggcacagggtcatttcaggtccttggggcaccctggaaacatctgatggttctctagggtcgaccggtcgaccggtcgaccctgttccatctgttcctgacctcgatctgaacttttctattctcagttatgtatttttccatgccttgcaaaatggcgttacttaagggctagctcatttcgaaccccagagtcccgctcagaagaactcgtcaagaaggcgatagaaggcgatgcgctgcgaatcgggagcggcgataccgtaaagcacgaggaagcggtcagcccattcgccgcaagctcttaacaatatacggtagcaacgctatgtctgatagcggtccgcacacccagcggcacagtcgatgatcagaaagcggcatttcacatntatcggaanagnatcgctgtacacaactgcgcgntnccttnctgcacagtcgtggcanctgtgttgnnaatctgnnaacgtcccatctctctacagtctggcatgcagaccgtanttcaccnatgtactatgnctttgaganggnagcgactccgnttcanacatctcctatnntacangcagancntgncnaacctctctatatagacgagngtta

SEQ ID NO: 321 - DNA, 400 bp, Artificial Sequence; identical to SEQ ID NO: 93
  Description of Artificial Sequence: Note = Synthetic Construct

SEQ ID NO: 322 - DNA, 859 bp, Artificial Sequence
  Description of Artificial Sequence: Note = Synthetic Construct
atcgagctacaaattaactctcactacagggaataagcttgcggccgcatgtgtttttttttttttttttttcaaactgtagtaagtgttttaattttctactaaacaataaaacctttagattttcactgggccagtgcctggtaacagcagactgggtggagtatccacagagggtggtggagcaagctgggctaccccaggctgggcacactcaacactctggcattcagctggaagatcctgggcagtaaaaacagcaagcaacacgtccacgcacaggattcccataagtgtgaggtcatcttgaatctaagttcagaatcactctggtgttcacagtgcttgtaagcaatgctgttgaggactttcatggctaagtcagaaacatctgggtagggatcagcggccaaatgcagtaagactctccaaatctgagtgtagacactattaaaggagactcctatgagggagttgagcgctgaataggagctcacacgccgcatcttgtcgatggtctcgaaggacaggatatactcctcgttctcagggcttcccaaggtgctgctggcactactacttgtactgaggttcccgggagagaaggccactgagctgcccgattcttccgtcaagctcaggttctgcaaagatttgttcaggttcctagctgtggtgacggctcggatgttcccataggagctcactgaccggagtctgggggtgcaccggctgtcttgaaatggagtcaagcttccttcctttggggctgctggaaaaagccaaggggtaattcttttcctcttccatgaactggagggccacaatgcctaaattgctctcaattttgggactccag

SEQ ID NO: 323 - DNA, 1036 bp, Artificial Sequence
  Description of Artificial Sequence: Note = Synthetic Construct
  misc_feature (9)..(9): n is a, c, g, or t
  misc_feature (11)..(11): n is a, c, g, or t
  misc_feature (15)..(15): n is a, c, g, or t
  misc_feature (26)..(26): n is a, c, g, or t
  misc_feature (40)..(40): n is a, c, g, or t
  misc_feature (58)..(59): n is a, c, g, or t
  misc_feature (97)..(98): n is a, c, g, or t
  misc_feature (113)..(113): n is a, c, g, or t
  misc_feature (147)..(147): n is a, c, g, or t
  misc_feature (162)..(162): n is a, c, g, or t
  misc_feature (177)..(177): n is a, c, g, or t
  misc_feature (209)..(209): n is a, c, g, or t
  misc_feature (221)..(221): n is a, c, g, or t
  misc_feature (224)..(224): n is a, c, g, or t
  misc_feature (228)..(228): n is a, c, g, or t
  misc_feature (342)..(342): n is a, c, g, or t
ccttccccntntttnttagcccaaanttaaccaacattgncaataaggggtcaaggannaattgaaggagtcaagttccttttgcaggattatatannttaggccccaaattntccaaaactcctaacctaaaactcttcacaaagngtggatataaattantcaaccaatcagtancttccttactcaaggataaccagtgagaaganttaaggaacacnctnttcncaatagtcccaaatgatataaaatccttggtgtgactctacccaagcaagtgaaagatctgtatgcaagacttcaagttctgaagaaagaatggaaaaagatctcagaagatgnaaagcctcccaggctcatggattggtaggattaatatagtaaaaatggccatcttgcagaaagcaatctacagattcaatgcaacccccatcaaattcccaactcaattcttcatagagttagaaagagcaatttgaaaattcatttggaaaaacttgaaaacccacgatattgaaaactattctcaacaataaaagaacttctatgggaatcatcaattctgacctccagctgtactacaaagcaatagtgataaatactgtatggcattggtacagagacaggcaggtagtcaatggaatagaattgaagacccaaaaatgaacccacacacctatggtcacttgattttgacagaggagctaaaaccgtccagtgtggggggaaaagacagcattttcagcaaatggtgctgattcaactggcagtcagcatgtagaagaatgcaagttgatccattcttatcaccctgtacaaagctccagtccaagtggttcaaagaccttcacataaagctagataccctcaaaataatagaattaaaagtgtggagacagaggaaaatttcttgaacagaacaccaatggcttgtgctctaagatcaatagttcaaccccttaaagtgctcaacatttggttttgcatgccagtgggggttgaaagaccccacctgtaggtgggcagcaaggggttc

SEQ ID NO: 324 - DNA, 1042 bp, Artificial Sequence
  Description of Artificial Sequence: Note = Synthetic Construct
  misc_feature (29)..(29): n is a, c, g, or t
  misc_feature (66)..(66): n is a, c, g, or t
  misc_feature (78)..(78): n is a, c, g, or t
  misc_feature (97)..(97): n is a, c, g, or t
  misc_feature (107)..(107): n is a, c, g, or t
  misc_feature (119)..(119): n is a, c, g, or t
  misc_feature (166)..(166): n is a, c, g, or t
  misc_feature (185)..(185): n is a, c, g, or t
  misc_feature (189)..(189): n is a, c, g, or t
  misc_feature (221)..(221): n is a, c, g, or t
  misc_feature (612)..(612): n is a, c, g, or t
  misc_feature (1040)..(1040): n is a, c, g, or t
aaaaaaaaagtttggaatttttaaaaccnaaaaaggaaatttagtaatccaaaatcccaattccancatcaaccctanttaagggaaaaaattttgncgtttccaantggcataagtcnaaaaagtagcactacccactgttccaatatgatttaagaactataanataagataggttggagtanacanaagaacctacgacgttaatgttttccaacacntaatgaaaatgaagtgtgatgaaaactggatgagatttttctaataaagaagacgctgacatcgagcacatttcaagtagacacacagagctaagatttcctcagtgaaaacactttgtccttagaacgcaccggccttgaagaaagcctcagaatccatggtacaggctatttccacaagcagacttctcagaagcatctttagagaccacggtcagcttctctgccttcagggcttggggaaagaggggcaccgagcccatctttcctctcggggagctgcagccttatggaaacgcttcaaaccttagctacttccagcttccacgggagagggggagcggcggagcgtggttccaccctatcctctcgcaccaagggcggctggcgnccgtggcagtgaggggaagagcggctggcgcttgcgtgcgtgtttacgtgtctcggatgggggtgggaagaggagacagagaggtcctaatgaaagatggagggggagggaagagagagaggggttgggaggaaggggaggcaccacctttcttttctctgctcttcctggggatctgaaaactccgcctaaaaggcctttccggctcttcggcgcctttgggcagagaggccgcggccgcctcggacttgttctgaagcggctcgtggccgtggctccgagcggcttcggctgccgccgtctcctcaggccccgcgccgccgccgcggccgccgagctccgcggtggagaagacgccgccattttgtagggaggactcaagctccggaagggctggctttgaaagaccccacctgtaggggggcaangc

SEQ ID NO: 325 - DNA, 1075 bp, Artificial Sequence
  Description of Artificial Sequence: Note = Synthetic Construct
  misc_feature (16)..(17): n is a, c, g, or t
  misc_feature (20)..(20): n is a, c, g, or t
  misc_feature (32)..(32): n is a, c, g, or t
  misc_feature (49)..(49): n is a, c, g, or t
  misc_feature (58)..(58): n is a, c, g, or t
  misc_feature (68)..(68): n is a, c, g, or t
  misc_feature (86)..(86): n is a, c, g, or t
  misc_feature (92)..(92): n is a, c, g, or t
  misc_feature (110)..(110): n is a, c, g, or t
  misc_feature (124)..(124): n is a, c, g, or t
  misc_feature (126)..(126): n is a, c, g, or t
  misc_feature (128)..(128): n is a, c, g, or t
  misc_feature (157)..(157): n is a, c, g, or t
  misc_feature (160)..(160): n is a, c, g, or t
  misc_feature (188)..(188): n is a, c, g, or t
  misc_feature (196)..(196): n is a, c, g, or t
  misc_feature (247)..(247): n is a, c, g, or t
  misc_feature (271)..(271): n is a, c, g, or t
  misc_feature (388)..(388): n is a, c, g, or t
  misc_feature (391)..(391): n is a, c, g, or t
  misc_feature (416)..(416): n is a, c, g, or t
  misc_feature (430)..(430): n is a, c, g, or t
  misc_feature (1053)..(1053): n is a, c, g, or t
caaagaacccggcccnnggncccccagtaaantggatggccggcacccnattttgaancaaccccctncaaaatttggttccgccnttaccntcccccacgggttacttnggggtttgtttttngncncttacttttaaaattccgcccttggactnttntttccttggactgttttaaaagtgtccnggattccntgtggcagcccatgaaccgggcatcaaggcctcatgtagccttctttggcnagtacaaggttcagtcttaggtanagattgagaaagtgtccttgtgattagctgtccattcttttctttggcacgtggccctaacttctagcattgccaagtctaccaagtccattcaagtcctgctgtttcccaactagntgnaaaatacttttttgttaatataccncaatgagaaagcgnatgccacgtggtaggcagtgactaagcacttcctacccgagcttgaagaatgagaggagctcagcatctctgatctggaatactggacacagacgagggaggaagaaagcttggtccaaacatagagaggtaggtggctgttaaggaggaggattgttctttaaaagacacctgtgatgctctttagtagagaggaggtgctgtcaacctggggctactctgtctatcttggggtgcaggaatctgaaaggtgctctgggggcctctgcaggagtctcattcccacactccctttcctgttgccttttcatcgaagtcttaatgaaaagacttctgacggaagtattacttatggagaatgtacccagggaagagagcacacaccagtctcttctgacccctctatacttctgcaacaaatgagaattgcttatgtaatttggggtgaaaagatacctacactactcatttgcctgcatgttaaccaaacatctggtccctgcagctgtaccaggcctctcaggttgttcttttcttcagaggatacttcttaaactacctattctaaattgctttttatttgattttttttaacatcagaacctattgaaagaccccaccanaggtggcagcaaggggtcaaaa

SEQ ID NO: 326 - DNA, 881 bp, Artificial Sequence
  Description of Artificial Sequence: Note = Synthetic Construct
  misc_feature (455)..(455): n is a, c, g, or t
gcggccgccctgcccagaggccccgatgagcccgaaaggcctgttaggaggagttttcagatccccaggaagagcagagaaaagaaagcacttttccagccattaactccaggctctcgagaatttgaagatgttgtaaatattctccattcttcttaccttgaaccaacctcagtaacaaattttaactacagacgtgcttgcttggtacacaatgagcttttggaaaaggagtttacagaaaagcgaagagaactgaagtttgatggtcgtttagataaggaactttcagaatcctatgcatttctgatggttgatcgataccaggttcaaaccatatgtgaaaaaggattacatgtgggtcagtccaaaataacaattcttggcagtccttccatgggtgtctatctttctaggtatgctgatttattacaagcgaatcctttggacacggnggcaatgggtgatgttgttatttttaaaataatgaagatctaacagctgggtaaaataaagagtatatatgaccccatgggtgtaaaaagtttggaatctatgttaaataagagtgctttggaccccacaccaaagcatgaatgtcacggtgtcaaagaatgccaatcggaattacatcacttttggcttacagagcctatgagcttactcagtattatttttatgagtatggctttgatgagctaaggcgaagaccaagacacgtttgtccatatgcagttgtgtcttttacttacaaagatgatatacaaactccgaagtttgtaccttcatcaagatctaacagctttaatacagatagaaacatagataaatataactataccttgtggaaaggacagcttttaaataaaggaaaacttttg

SEQ ID NO: 327 - DNA, 900 bp, Artificial Sequence
  Description of Artificial Sequence: Note = Synthetic Construct
  misc_feature (5)..(5): n is a, c, g, or t
  misc_feature (16)..(16): n is a, c, g, or t
  misc_feature (27)..(29): n is a, c, g, or t
  misc_feature (31)..(31): n is a, c, g, or t
  misc_feature (37)..(37): n is a, c, g, or t
  misc_feature (43)..(43): n is a, c, g, or t
  misc_feature (46)..(47): n is a, c, g, or t
  misc_feature (56)..(56): n is a, c, g, or t
  misc_feature (61)..(61): n is a, c, g, or t
  misc_feature (64)..(64): n is a, c, g, or t
  misc_feature (69)..(69): n is a, c, g, or t
  misc_feature (76)..(76): n is a, c, g, or t
  misc_feature (78)..(78): n is a, c, g, or t
  misc_feature (82)..(82): n is a, c, g, or t
  misc_feature (88)..(88): n is a, c, g, or t
  misc_feature (94)..(95): n is a, c, g, or t
  misc_feature (99)..(99): n is a, c, g, or t
  misc_feature (102)..(102): n is a, c, g, or t
  misc_feature (104)..(104): n is a, c, g, or t
  misc_feature (107)..(107): n is a, c, g, or t
  misc_feature (114)..(114): n is a, c, g, or t
  misc_feature (130)..(132): n is a, c, g, or t
  misc_feature (134)..(134): n is a, c, g, or t
  misc_feature (136)..(136): n is a, c, g, or t
  misc_feature (140)..(140): n is a, c, g, or t
  misc_feature (144)..(145): n is a, c, g, or t
  misc_feature (147)..(147): n is a, c, g, or t
  misc_feature (150)..(151): n is a, c, g, or t
  misc_feature (153)..(153): n is a, c, g, or t
  misc_feature (157)..(158): n is a, c, g, or t
  misc_feature (160)..(160): n is a, c, g, or t
  misc_feature (162)..(162): n is a, c, g, or t
  misc_feature (164)..(164): n is a, c, g, or t
  misc_feature (170)..(170): n is a, c, g, or t
  misc_feature (173)..(173): n is a, c, g, or t
  misc_feature (176)..(176): n is a, c, g, or t
  misc_feature (186)..(187): n is a, c, g, or t
  misc_feature (193)..(193): n is a, c, g, or t
  misc_feature (197)..(197): n is a, c, g, or t
  misc_feature (200)..(200): n is a, c, g, or t
  misc_feature (202)..(202): n is a, c, g, or t
  misc_feature (205)..(205): n is a, c, g, or t
  misc_feature (212)..(213): n is a, c, g, or t
  misc_feature (216)..(216): n is a, c, g, or t
  misc_feature (221)..(222): n is a, c, g, or t
  misc_feature (224)..(227): n is a, c, g, or t
  misc_feature (231)..(231): n is a, c, g, or t
  misc_feature (233)..(233): n is a, c, g, or t
  misc_feature (236)..(236): n is a, c, g, or t
  misc_feature (250)..(253): n is a, c, g, or t
  misc_feature (257)..(260): n is a, c, g, or t
  misc_feature (264)..(264): n is a, c, g, or t
  misc_feature (267)..(267): n is a, c, g, or t
  misc_feature (273)..(273): n is a, c, g, or t
  misc_feature (276)..(276): n is a, c, g, or t
  misc_feature (278)..(279): n is a, c, g, or t
  misc_feature (283)..(283): n is a, c, g, or t
  misc_feature (286)..(286): n is a, c, g, or t
  misc_feature (289)..(289): n is a, c, g, or t
  misc_feature (292)..(292): n is a, c, g, or t
  misc_feature (301)..(302): n is a, c, g, or t
  misc_feature (304)..(304): n is a, c, g, or t
  misc_feature (306)..(307): n is a, c, g, or t
  misc_feature (309)..(309): n is a, c, g, or t
  misc_feature (312)..(312): n is a, c, g, or t
  misc_feature (314)..(314): n is a, c, g, or t
  misc_feature (316)..(316): n is a, c, g, or t
  misc_feature (326)..(326): n is a, c, g, or t
  misc_feature (328)..(328): n is a, c, g, or t
  misc_feature (343)..(343): n is a, c, g, or t
  misc_feature (345)..(346): n is a, c, g, or t
  misc_feature (349)..(352): n is a, c, g, or t
  misc_feature (360)..(360): n is a, c, g, or t
  misc_feature (365)..(365): n is a, c, g, or t
  misc_feature (378)..(378): n is a, c, g, or t
  misc_feature (385)..(385): n is a, c, g, or t
  misc_feature (393)..(393): n is a, c, g, or t
  misc_feature (398)..(398): n is a, c, g, or t
  misc_feature (404)..(404): n is a, c, g, or t
  misc_feature (406)..(409): n is a, c, g, or t
  misc_feature (432)..(432): n is a, c, g, or t
  misc_feature (449)..(449): n is a, c, g, or t
  misc_feature (473)..(473): n is a, c, g, or t
  misc_feature (482)..(482): n is a, c, g, or t
  misc_feature (484)..(484): n is a, c, g, or t
  misc_feature (489)..(489): n is a, c, g, or t
  misc_feature (492)..(492): n is a, c, g, or t
  misc_feature (498)..(498): n is a, c, g, or t
  misc_feature (503)..(503): n is a, c, g, or t
  misc_feature (506)..(506): n is a, c, g, or t
  misc_feature (510)..(510): n is a, c, g, or t
  misc_feature (521)..(521): n is a, c, g, or t
  misc_feature (525)..(525): n is a, c, g, or t
  misc_feature (527)..(527): n is a, c, g, or t
  misc_feature (529)..(529): n is a, c, g, or t
  misc_feature (534)..(534): n is a, c, g, or t
  misc_feature (554)..(554): n is a, c, g, or t
  misc_feature (559)..(560): n is a, c, g, or t
  misc_feature (563)..(563): n is a, c, g, or t
  misc_feature (569)..(569): n is a, c, g, or t
  misc_feature (576)..(576): n is a, c, g, or t
  misc_feature (589)..(589): n is a, c, g, or t
  misc_feature (591)..(591): n is a, c, g, or t
  misc_feature (597)..(597): n is a, c, g, or t
  misc_feature (617)..(617): n is a, c, g, or t
  misc_feature (623)..(625): n is a, c, g, or t
  misc_feature (632)..(632): n is a, c, g, or t
  misc_feature (643)..(643): n is a, c, g, or t
  misc_feature (645)..(645): n is a, c, g, or t
  misc_feature (650)..(650): n is a, c, g, or t
  misc_feature (653)..(653): n is a, c, g, or t
  misc_feature (655)..(655): n is a, c, g, or t
  misc_feature (657)..(657): n is a, c, g, or t
  misc_feature (662)..(663): n is a, c, g, or t
  misc_feature (674)..(674): n is a, c, g, or t
  misc_feature (679)..(679): n is a, c, g, or t
  misc_feature (682)..(682): n is a, c, g, or t
  misc_feature (685)..(685): n is a, c, g, or t
  misc_feature (689)..(690): n is a, c, g, or t
  misc_feature (704)..(704): n is a, c, g, or t
  misc_feature (712)..(712): n is a, c, g, or t
  misc_feature (721)..(722): n is a, c, g, or t
  misc_feature (725)..(728): n is a, c, g, or t
  misc_feature (732)..(732): n is a, c, g, or t
  misc_feature (737)..(737): n is a, c, g, or t
  misc_feature (751)..(751): n is a, c, g, or t
  misc_feature (754)..(754): n is a, c, g, or t
  misc_feature (756)..(756): n is a, c, g, or t
  misc_feature (758)..(758): n is a, c, g, or t
  misc_feature (762)..(762): n is a, c, g, or t
  misc_feature (768)..(768): n is a, c, g, or t
  misc_feature (770)..(773): n is a, c, g, or t
  misc_feature (778)..(778): n is a, c, g, or t
  misc_feature (788)..(788): n is a, c, g, or t
  misc_feature (792)..(792): n is a, c, g, or t
  misc_feature (803)..(803): n is a, c, g, or t
  misc_feature (808)..(808): n is a, c, g, or t
  misc_feature (820)..(820): n is a, c, g, or t
  misc_feature (828)..(828): n is a, c, g, or t
  misc_feature (835)..(835): n is a, c, g, or t
  misc_feature (854)..(854): n is a, c, g, or t
  misc_feature (862)..(862): n is a, c, g, or t
  misc_feature (889)..(889): n is a, c, g, or t
  misc_feature (893)..(893): n is a, c, g, or t
gatgngctctcagagncatatatacgnnncngggggngtctcncanntacaccccncagantanacccncaccccncncggngtgccngagacnntggngtncnagntgtgtgngaaaagcgccccgctnnncntntcanaccnntntcnntnctcnncncncnctcccncanacncctcaacagnnctctcnaaanacntntcnccacatnntcncctcnntnnnntgcncnccnagatctcaaacccnnnncccnnnnccanatntctggngtnanncccnagnctnggngtcggggcnnancnntntcncngnggggctcccncncccctggggtaaccntnntcnnnncacccctntcctngtgttcctccccnggggtgnctcaaaantcccnaaaatntnnnnggggggatagatatcccgtgagnatatatacccacacccnctctctgtgtatccacacatatcntctctctcntngagantcntcctgngaaanccntatntctctcaaaantccncncnttctnctctcacatatgtgggttanacccnncantcatangtgcganattatactctctnanaggctngtgctcccttttcaaaaatnccggcnnnaccaaantttttcatatncnctctnccncncnaaatnngggtccccccnactcnatngcnaaannttctcttcaaaacncttgccantttttcccnnaannnntcanaaaantaggttccaaaagngancntngggntccccnannnnttttnggggggcccnaacnctttcctcccnaaaanattaatttttanaaaaaaancctttancttttttttctcctgaaanttacaaangaaaaaaccctctcttttttttcaacntccnaaagggg

SEQ ID NO: 328 - DNA, 307 bp, Artificial Sequence
  Description of Artificial Sequence: Note = Synthetic Construct
  misc_feature (123)..(187): n is a, c, g, or t
tatttcactcattaaaagactgaacaccaggaaggcgagaaaccaggtgtgggaacaaacgcctcctataatcgcagacctcaggaggccaagacagaaggttgagttccaggccaacgtggnnnnnnnnnnnnnnnnnnnnnnnnnnnnnnnnnnnnnnnnnnnnnnnnnnnnnnnnnnnnnnnnnttatttcactcattaaaagactgaacaccaggaaggcgagaaaccaggtgtgggaacaaacgcctcctataatcgcagacctcaggaggccaagacagaaggttgagttccaggccaacg

SEQ ID NO: 329 - DNA, 815 bp, Artificial Sequence
  Description of Artificial Sequence: Note = Synthetic Construct
  misc_feature (149)..(290): n is a, c, g, or t
  misc_feature (304)..(304): n is a, c, g, or t
  misc_feature (475)..(475): n is a, c, g, or t
  misc_feature (487)..(487): n is a, c, g, or t
  misc_feature (503)..(503): n is a, c, g, or t
  misc_feature (519)..(519): n is a, c, g, or t
  misc_feature (553)..(553): n is a, c, g, or t
  misc_feature (564)..(564): n is a, c, g, or t
  misc_feature (575)..(575): n is a, c, g, or t
  misc_feature (609)..(609): n is a, c, g, or t
  misc_feature (613)..(613): n is a, c, g, or t
  misc_feature (617)..(617): n is a, c, g, or t
  misc_feature (624)..(624): n is a, c, g, or t
  misc_feature (640)..(640): n is a, c, g, or t
  misc_feature (661)..(661): n is a, c, g, or t
  misc_feature (664)..(664): n is a, c, g, or t
  misc_feature (681)..(681): n is a, c, g, or t
  misc_feature (700)..(701): n is a, c, g, or t
  misc_feature (719)..(719): n is a, c, g, or t
  misc_feature (728)..(728): n is a, c, g, or t
  misc_feature (753)..(753): n is a, c, g, or t
  misc_feature (767)..(767): n is a, c, g, or t
  misc_feature (780)..(780): n is a, c, g, or t
  misc_feature (785)..(785): n is a, c, g, or t
  misc_feature (795)..(796): n is a, c, g, or t
  misc_feature (813)..(813): n is a, c, g, or t
cttgatatcgaattcactcctacaaattgttctctgacctctaatgcacacagtgtggtttgtacacctacccttcgtgtgtgcatgcatacctacgcacaggcacacagacacaataaataaaaatttccaggtagggtagcggctgnnnnnnnnnnnnnnnnnnnnnnnnnnnnnnnnnnnnnnnnnnnnnnnnnnnnnnnnnnnnnnnnnnnnnnnnnnnnnnnnnnnnnnnnnnnnnnnnnnnnnnnnnnnnnnnnnnnnnnnnnnnnnnnnnnnnnnnnnnnnnnggcgttgaggcaanaggttatcattctaactggggagccagaaaaggtacacacaaaaggtacctttgtaaatgtttcttaaccaaatataagaggagaggcattcattctgacagagaagactacatgaccgtggcaagggccccagaatcaagcaacatcagaactgggtgtaatggcaacanccgggattccancacttgtaaggctaangcggaaggttcctgantccgagaatcataatcctaagcaaattcttaacntcaacagcaantcactgtcacnccagagaaacaaatctatgctgtccaaagggganatanatgncctcggncctaaattcccgtaancactgggtgtaacgtcaaccngcncctgtttgttggcttgngtttttacccaaaaaaagnntttcccttacctggaaanccccctgtntcccactgaaaaaacccccctgaanggttatcaatcacnccaagggaaaccncccanggaaaaccannaccaaattcggttgaantt

SEQ ID NO: 330 - DNA, 961 bp, Artificial Sequence
  Description of Artificial Sequence: Note = Synthetic Construct
  misc_feature (31)..(31): n is a, c, g, or t
  misc_feature (43)..(43): n is a, c, g, or t
  misc_feature (58)..(59): n is a, c, g, or t
  misc_feature (61)..(61): n is a, c, g, or t
  misc_feature (68)..(68): n is a, c, g, or t
  misc_feature (70)..(70): n is a, c, g, or t
  misc_feature (76)..(76): n is a, c, g, or t
  misc_feature (80)..(80): n is a, c, g, or t
  misc_feature (89)..(89): n is a, c, g, or t
  misc_feature (96)..(97): n is a, c, g, or t
  misc_feature (106)..(106): n is a, c, g, or t
  misc_feature (116)..(116): n is a, c, g, or t
  misc_feature (127)..(127): n is a, c, g, or t
  misc_feature (138)..(139): n is a, c, g, or t
  misc_feature (142)..(143): n is a, c, g, or t
  misc_feature (154)..(154): n is a, c, g, or t
  misc_feature (156)..(156): n is a, c, g, or t
  misc_feature (172)..(172): n is a, c, g, or t
  misc_feature (180)..(180): n is a, c, g, or t
  misc_feature (188)..(188): n is a, c, g, or t
  misc_feature (193)..(194): n is a, c, g, or t
  misc_feature (196)..(196): n is a, c, g, or t
  misc_feature (202)..(203): n is a, c, g, or t
  misc_feature (211)..(211): n is a, c, g, or t
  misc_feature (231)..(231): n is a, c, g, or t
  misc_feature (239)..(239): n is a, c, g, or t
  misc_feature (241)..(242): n is a, c, g, or t
  misc_feature (247)..(247): n is a, c, g, or t
  misc_feature (250)..(250): n is a, c, g, or t
  misc_feature (259)..(259): n is a, c, g, or t
  misc_feature (270)..(270): n is a, c, g, or t
  misc_feature (274)..(274): n is a, c, g, or t
  misc_feature (281)..(281): n is a, c, g, or t
  misc_feature (283)..(283): n is a, c, g, or t
  misc_feature (288)..(288): n is a, c, g, or t
  misc_feature (292)..(292): n is a, c, g, or t
  misc_feature (303)..(304): n is a, c, g, or t
  misc_feature (308)..(308): n is a, c, g, or t
  misc_feature (312)..(312): n is a, c, g, or t
  misc_feature (322)..(322): n is a, c, g, or t
  misc_feature (333)..(334): n is a, c, g, or t
  misc_feature (338)..(338): n is a, c, g, or t
  misc_feature (340)..(341): n is a, c, g, or t
  misc_feature (351)..(351): n is a, c, g, or t
  misc_feature (367)..(368): n is a, c, g, or t
  misc_feature (379)..(379): n is a, c, g, or t
  misc_feature (388)..(390): n is a, c, g, or t
  misc_feature (394)..(394): n is a, c, g, or t
  misc_feature (396)..(396): n is a, c, g, or t
  misc_feature (413)..(413): n is a, c, g, or t
  misc_feature (426)..(428): n is a, c, g, or t
  misc_feature (432)..(432): n is a, c, g, or t
  misc_feature (442)..(442): n is a, c, g, or t
  misc_feature (444)..(446): n is a, c, g, or t
  misc_feature (469)..(469): n is a, c, g, or t
  misc_feature (476)..(476): n is a, c, g, or t
  misc_feature (482)..(482): n is a, c, g, or t
  misc_feature (488)..(488): n is a, c, g, or t
  misc_feature (493)..(493): n is a, c, g, or t
  misc_feature (496)..(496): n is a, c, g, or t
  misc_feature (498)..(499): n is a, c, g, or t
  misc_feature (503)..(503): n is a, c, g, or t
  misc_feature (505)..(505): n is a, c, g, or t
  misc_feature (509)..(509): n is a, c, g, or t
  misc_feature (513)..(513): n is a, c, g, or t
  misc_feature (522)..(523): n is a, c, g, or t
  misc_feature (530)..(531): n is a, c, g, or t
  misc_feature (533)..(533): n is a, c, g, or t
  misc_feature (536)..(536): n is a, c, g, or t
  misc_feature (538)..(538): n is a, c, g, or t
  misc_feature (541)..(541): n is a, c, g, or t
  misc_feature (550)..(550): n is a, c, g, or t
  misc_feature (553)..(553): n is a, c, g, or t
  misc_feature (561)..(562): n is a, c, g, or t
  misc_feature (567)..(567): n is a, c, g, or t
  misc_feature (571)..(571): n is a, c, g, or t
  misc_feature (585)..(585): n is a, c, g, or t
  misc_feature (588)..(588): n is a, c, g, or t
  misc_feature (590)..(590): n is a, c, g, or t
  misc_feature (592)..(594): n is a, c, g, or t
  misc_feature (596)..(598): n is a, c, g, or t
  misc_feature (601)..(601): n is a, c, g, or t
  misc_feature (606)..(606): n is a, c, g, or t
  misc_feature (608)..(609): n is a, c, g, or t
  misc_feature (614)..(616): n is a, c, g, or t
  misc_feature (619)..(619): n is a, c, g, or t
  misc_feature (628)..(628): n is a, c, g, or t
  misc_feature (644)..(644): n is a, c, g, or t
  misc_feature (651)..(651): n is a, c, g, or t
  misc_feature (654)..(654): n is a, c, g, or t
  misc_feature (656)..(656): n is a, c, g, or t
  misc_feature (665)..(665): n is a, c, g, or t
  misc_feature (673)..(674): n is a, c, g, or t
  misc_feature (683)..(684): n is a, c, g, or t
  misc_feature (689)..(689): n is a, c, g, or t
  misc_feature (693)..(693): n is a, c, g, or t
  misc_feature (701)..(701): n is a, c, g, or t
  misc_feature (703)..(703): n is a, c, g, or t
  misc_feature (706)..(706): n is a, c, g, or t
  misc_feature (711)..(711): n is a, c, g, or t
  misc_feature (722)..(722): n is a, c, g, or t
  misc_feature (734)..(734): n is a, c, g, or t
  misc_feature (737)..(737): n is a, c, g, or t
  misc_feature (745)..(745): n is a, c, g, or t
  misc_feature (750)..(750): n is a, c, g, or t
  misc_feature (756)..(757): n is a, c, g, or t
  misc_feature (759)..(759): n is a, c, g, or t
  misc_feature (764)..(765): n is a, c, g, or t
  misc_feature (770)..(770): n is a, c, g, or t
  misc_feature (780)..(780): n is a, c, g, or t
  misc_feature (785)..(786): n is a, c, g, or t
  misc_feature (788)..(788): n is a, c, g, or t
  misc_feature (798)..(798): n is a, c, g, or t
  misc_feature (801)..(801): n is a, c, g, or t
  misc_feature (803)..(803): n is a, c, g, or t
  misc_feature (805)..(805): n is a, c, g, or t
  misc_feature (807)..(808): n is a, c, g, or t
  misc_feature (813)..(813): n is a, c, g, or t
  misc_feature (816)..(816): n is a, c, g, or t
  misc_feature (823)..(823): n is a, c, g, or t
  misc_feature (825)..(825): n is a, c, g, or t
  misc_feature (835)..(836): n is a, c, g, or t
  misc_feature (841)..(841): n is a, c, g, or t
  misc_feature (843)..(843): n is a, c, g, or t
  misc_feature (845)..(845): n is a, c, g, or t
  misc_feature (847)..(847): n is a, c, g, or t
  misc_feature (850)..(850): n is a, c, g, or t
  misc_feature (854)..(854): n is a, c, g, or t
  misc_feature (865)..(865): n is a, c, g, or t
  misc_feature (868)..(868): n is a, c, g, or t
  misc_feature (872)..(872): n is a, c, g, or t
  misc_feature (879)..(879): n is a, c, g, or t
  misc_feature (881)..(881): n is a, c, g, or t
  misc_feature (884)..(884): n is a, c, g, or t
  misc_feature (893)..(893): n is a, c, g, or t
  misc_feature (908)..(908): n is a, c, g, or t
  misc_feature (918)..(919): n is a, c, g, or t
  misc_feature (923)..(923): n is a, c, g, or t
  misc_feature (926)..(926): n is a, c, g, or t
  misc_feature (929)..(929): n is a, c, g, or t
  misc_feature (932)..(932): n is a, c, g, or t
  misc_feature (939)..(940): n is a, c, g, or t
  misc_feature (947)..(947): n is a, c, g, or t
  misc_feature (953)..(953): n is a, c, g, or t
taaatttttacggggccctcctcgaggtttnaggtatcgaggncccttgatatctggnnangcccatncncgcctntgcncacggttcntgacagnnggtccccanttttcgtctntcacctcagcngtttctccatnnccnncagatttgctnangtgcccggctagaccntttctgtncctgtgcnctacnntnaactgnncatctctncttcgcgtcacacatcggtncgcgctcntnngctcnacnagctcaatngtagagcccanagcncctcacncngcgcnccantcctccctctnnagtnagtntcccgggtanccatgtctccnncctnanntcttgcagtncacccatccctgtggnntcgctgttccntgggaaggnnncctntncctgattgacttccgtnagcgggggtcttnnnttcngggctcgatncnnntcgtcaggcatctgcgcctggancctgganacacantccggnaggtncgntnnccancngctnatcngtgtattcnnctttctnngnccngnttnaatttaagngcntgctctcnntaatncttngtctcacttctcgnctntngnnnannnttngggtnanngcgtnnnttngcggccacntggcttcaaccctggngagatanctncngggctttcnggcgggcnnttttttgtnnggccnatcntgctcccngnatncccanttttttgggcnacctttgttgcnccncccttacnatggnggaacnntngttcnngtgtnaggcccgttnccttnncncttcttcccnccntngnannttctnccnttggttngnggccatgccnngcccntntncnttncttncggggcctccnggntttnctctttncnctnggttcttcngttcccgctattctngggccccagnncaanccnttncgncccccannctttggncttgtncctggttg

SEQ ID NO: 331 - DNA, 985 bp, Artificial Sequence
  Description of Artificial Sequence: Note = Synthetic Construct
  misc_feature (9)..(9): n is a, c, g, or t
  misc_feature (26)..(27): n is a, c, g, or t
  misc_feature (31)..(31): n is a, c, g, or t
  misc_feature (36)..(36): n is a, c, g, or t
  misc_feature (41)..(41): n is a, c, g, or t
  misc_feature (49)..(49): n is a, c, g, or t
  misc_feature (52)..(53): n is a, c, g, or t
  misc_feature (56)..(57): n is a, c, g, or t
  misc_feature (59)..(59): n is a, c, g, or t
  misc_feature (62)..(62): n is a, c, g, or t
  misc_feature (64)..(64): n is a, c, g, or t
  misc_feature (69)..(69): n is a, c, g, or t
  misc_feature (71)..(71): n is a, c, g, or t
  misc_feature (74)..(74): n is a, c, g, or t
  misc_feature (77)..(77): n is a, c, g, or t
  misc_feature (85)..(85): n is a, c, g, or t
  misc_feature (90)..(91): n is a, c, g, or t
  misc_feature (98)..(98): n is a, c, g, or t
  misc_feature (103)..(103): n is a, c, g, or t
  misc_feature (117)..(117): n is a, c, g, or t
  misc_feature (120)..(122): n is a, c, g, or t
  misc_feature (128)..(128): n is a, c, g, or t
  misc_feature (136)..(137): n is a, c, g, or t
  misc_feature (141)..(141): n is a, c, g, or t
  misc_feature (143)..(144): n is a, c, g, or t
  misc_feature (146)..(147): n is a, c, g, or t
  misc_feature (149)..(149): n is a, c, g, or t
  misc_feature (164)..(164): n is a, c, g, or t
  misc_feature (166)..(166): n is a, c, g, or t
  misc_feature (173)..(173): n is a, c, g, or t
  misc_feature (180)..(180): n is a, c, g, or t
  misc_feature (185)..(186): n is a, c, g, or t
  misc_feature (190)..(190): n is a, c, g, or t
  misc_feature (207)..(207): n is a, c, g, or t
  misc_feature (219)..(219): n is a, c, g, or t
  misc_feature (228)..(228): n is a, c, g, or t
  misc_feature (234)..(235): n is a, c, g, or t
  misc_feature (238)..(239): n is a, c, g, or t
  misc_feature (244)..(245): n is a, c, g, or t
  misc_feature (252)..(252): n is a, c, g, or t
  misc_feature (256)..(256): n is a, c, g, or t
  misc_feature (260)..(260): n is a, c, g, or t
  misc_feature (264)..(264): n is a, c, g, or t
  misc_feature (269)..(269): n is a, c, g, or t
  misc_feature (271)..(271): n is a, c, g, or t
  misc_feature (276)..(276): n is a, c, g, or t
  misc_feature (279)..(279): n is a, c, g, or t
  misc_feature (285)..(286): n is a, c, g, or t
  misc_feature (290)..(290): n is a, c, g, or t
  misc_feature (294)..(294): n is a, c, g, or t
  misc_feature (297)..(298): n is a, c, g, or t
  misc_feature (301)..(302): n is a, c, g, or t
  misc_feature (304)..(305): n is a, c, g, or t
  misc_feature (312)..(312): n is a, c, g, or t
  misc_feature (329)..(329): n is a, c, g, or t
  misc_feature (338)..(338): n is a, c, g, or t
  misc_feature (343)..(343): n is a, c, g, or t
  misc_feature (352)..(352): n is a, c, g, or t
  misc_feature (363)..(363): n is a, c, g, or t
  misc_feature (370)..(370): n is a, c, g, or t
  misc_feature (378)..(378): n is a, c, g, or t
  misc_feature (380)..(381): n is a, c, g, or t
  misc_feature (383)..(383): n is a, c, g, or t
  misc_feature (386)..(387): n is a, c, g, or t
  misc_feature (390)..(390): n is a, c, g, or t
  misc_feature (392)..(392): n is a, c, g, or t
  misc_feature (394)..(395): n is a, c, g, or t
  misc_feature (413)..(413): n is a, c, g, or t
  misc_feature (424)..(426): n is a, c, g, or t
  misc_feature (432)..(432): n is a, c, g, or t
  misc_feature (438)..(438): n is a, c, g, or t
  misc_feature (445)..(445): n is a, c, g, or t
  misc_feature (450)..(451): n is a, c, g, or t
  misc_feature (456)..(457): n is a, c, g, or t
  misc_feature (464)..(464): n is a, c, g, or t
  misc_feature (466)..(466): n is a, c, g, or t
  misc_feature (472)..(473): n is a, c, g, or t
  misc_feature (475)..(475): n is a, c, g, or t
  misc_feature (482)..(482): n is a, c, g, or t
  misc_feature (491)..(491): n is a, c, g, or t
  misc_feature (493)..(493): n is a, c, g, or t
  misc_feature (498)..(498): n is a, c, g, or t
  misc_feature (508)..(508): n is a, c, g, or t
  misc_feature (514)..(514): n is a, c, g, or t
  misc_feature (520)..(522): n is a, c, g, or t
  misc_feature (524)..(524): n is a, c, g, or t
  misc_feature (526)..(527): n is a, c, g, or t
  misc_feature (535)..(536): n is a, c, g, or t
  misc_feature (539)..(539): n is a, c, g, or t
  misc_feature (547)..(547): n is a, c, g, or t
  misc_feature (552)..(552): n is a, c, g, or t
  misc_feature (575)..(575): n is a, c, g, or t
  misc_feature (578)..(578): n is a, c, g, or t
  misc_feature (590)..(591): n is a, c, g, or t
  misc_feature (602)..(603): n is a, c, g, or t
  misc_feature (607)..(607): n is a, c, g, or t
  misc_feature (609)..(609): n is a, c, g, or t
  misc_feature (613)..(613): n is a, c, g, or t
  misc_feature (615)..(617): n is a, c, g, or t
  misc_feature (624)..(624): n is a, c, g, or t
  misc_feature (632)..(633): n is a, c, g, or t
  misc_feature (636)..(637): n is a, c, g, or t
  misc_feature (640)..(640): n is a, c, g, or t
  misc_feature (643)..(643): n is a, c, g, or t
  misc_feature (646)..(646): n is a, c, g, or t
  misc_feature (655)..(655): n is a, c, g, or t
  misc_feature (658)..(659): n is a, c, g, or t
  misc_feature (665)..(665): n is a, c, g, or t
  misc_feature (678)..(678): n is a, c, g, or t
  misc_feature (683)..(684): n is a, c, g, or t
  misc_feature (686)..(686): n is a, c, g, or t
  misc_feature (698)..(698): n is a, c, g, or t
  misc_feature (700)..(700): n is a, c, g, or t
  misc_feature (710)..(710): n is a, c, g, or t
  misc_feature (715)..(715): n is a, c, g, or t
  misc_feature (731)..(732): n is a, c, g, or t
  misc_feature (737)..(737): n is a, c, g, or t
  misc_feature (745)..(745): n is a, c, g, or t
  misc_feature (750)..(752): n is a, c, g, or t
  misc_feature (756)..(756): n is a, c, g, or t
  misc_feature (761)..(761): n is a, c, g, or t
  misc_feature (773)..(773): n is a, c, g, or t
  misc_feature (779)..(779): n is a, c, g, or t
  misc_feature (791)..(792): n is a, c, g, or t
  misc_feature (801)..(801): n is a, c, g, or t
  misc_feature (804)..(805): n is a, c, g, or t
  misc_feature (813)..(813): n is a, c, g, or t
  misc_feature (819)..(819): n is a, c, g, or t
  misc_feature (824)..(824): n is a, c, g, or t
  misc_feature (831)..(831): n is a, c, g, or t
  misc_feature (842)..(843): n is a, c, g, or t
  misc_feature (853)..(853): n is a, c, g, or t
  misc_feature (860)..(860): n is a, c, g, or t
  misc_feature (865)..(865): n is a, c, g, or t
  misc_feature (875)..(875): n is a, c, g, or t
  misc_feature (878)..(879): n is a, c, g, or t
  misc_feature (885)..(885): n is a, c, g, or t
  misc_feature (888)..(888): n is a, c, g, or t
  misc_feature (895)..(895): n is a, c, g, or t
  misc_feature (897)..(897): n is a, c, g, or t
  misc_feature (912)..(912): n is a, c, g, or t
  misc_feature (921)..(921): n is a, c, g, or t
  misc_feature (945)..(945): n is a, c, g, or t
  misc_feature (948)..(948): n is a, c, g, or t
  misc_feature (952)..(952): n is a, c, g, or t
tgtttacgngcccccctcgaggtcannagtntcganacccntgatatcnggnnaanncnatncncgccngngcnaanggtaaatnacatnnggtcccnacttntcggtctatcactnatnnntttctncatgaccnngcananntnncnataggtgcccggctngnccagttntgacccngtgcnntatntcaactagaccactcanttcaacgtcacnacttcggtncgcgcnnttnngctcnnccagctnaacngtanagcncaaangnccctnacncggcannccantccnccnnctnnannattctcncgggtacccatgtctcnatcatgacntctgncagttgcanccagacttgtngactcgntgttcccngnnanggnnccntntnnctgcattgacaatccgtnagcaggggtcnnnatttcngggctngatcggnatcgnnagacnnctgcccntngaccanngngacaacntcgggaggnangatgnccagcagctnatcggngacatnnncntnntcgacagnncangattcatntaagnaccttgctctccgtatagatagntangcttgcgtggtnnctgggcaaccnntcgngntaangnnnaagttcnggacacanngcnncanccntgngagacatcntcnngacttnagggggcgttttnttgtnncncgatctgccccngnaattcccctngtttnggccacttttggcccnnccccncttacagngggannnattnttctngtaggaacaccngtcctnaaaaaccttcanngccctcgtnggnnacttctgncatttnatttngggcaanggccaaggccnntcttttttangctaaangaccncccggttttnccnntaaaanggnggtcccnantccaccgaaaactgnggccccggncaaaaccgttaaaacccctaacanttngccnggggaactggcgaaaaatccacctggttccccc

SEQ ID NO: 332 - DNA, 827 bp, Artificial Sequence
  Description of Artificial Sequence: Note = Synthetic Construct
aaaggagttaggaacaacatttcacatagggccccaatggttaaatgccttggtgtgagtaaacccagggggttgaagatgtgtttgacagaatttaaagtgttttgaggaaggaattgggaaagatctcagagggtgaagggcctcccaggcggatggagtgttgggattattatggtaaaaatgccatttgcagaaagcattgtacgattcaatgcaccccccatcaaatgccaattcagttgttcttggggttagaaggagcaatttgaaaattcatgtggaaaaagtgaaaacccacgatgttgaaaattattgtcaacactaaagaattatatgggaatcatcaattgtgacgtccagctgtagtacaaggcagtagtgataagtactgtatggcattggtacggagacaggcaggtagtcaatggaatggaattgaagacccaaaagtgaacccacacacctatggtcacttgattttgacagaggagctaaaaccgtccagtgtggggggaaaagacagcattttcagcaaatgtgctgattcaactggcagtcagcatgtagaggaatgcaagttgatccattcttatcaccgtgtacaaagctccagtccaagtggtgcaaagacgttcacataaagctaggtaccctcaaagtaatggaattaaaagtgtggagacagaggaaaatttcttgaacagaacaccaatggcgtgtgcgctagatcagtagttcaaccccttaaagtgctcaacagttggttgtgcatgccagtgtgggctgaaagacttgacctgtaggtttgggcggctagaaagatc

SEQ ID NO: 333 - DNA, 676 bp, Artificial Sequence
  Description of Artificial Sequence: Note = Synthetic Construct
  misc_feature (7)..(7): n is a, c, g, or t
  misc_feature (30)..(31): n is a, c, g, or t
  misc_feature (40)..(40): n is a, c, g, or t
  misc_feature (47)..(47): n is a, c, g, or t
  misc_feature (59)..(59): n is a, c, g, or t
  misc_feature (70)..(72): n is a, c, g, or t
  misc_feature (81)..(81): n is a, c, g, or t
  misc_feature (83)..(83): n is a, c, g, or t
  misc_feature (102)..(102): n is a, c, g, or t
  misc_feature (109)..(109): n is a, c, g, or t
  misc_feature (121)..(121): n is a, c, g, or t
  misc_feature (125)..(125): n is a, c, g, or t
  misc_feature (136)..(136): n is a, c, g, or t
  misc_feature (143)..(143): n is a, c, g, or t
  misc_feature (154)..(155): n is a, c, g, or t
  misc_feature (161)..(161): n is a, c, g, or t
  misc_feature (166)..(166): n is a, c, g, or t
  misc_feature (226)..(288): n is a, c, g, or t
  misc_feature (307)..(307): n is a, c, g, or t
  misc_feature (315)..(315): n is a, c, g, or t
  misc_feature (318)..(318): n is a, c, g, or t
  misc_feature (323)..(566): n is a, c, g, or t
  misc_feature (569)..(569): n is a, c, g, or t
  misc_feature (575)..(575): n is a, c, g, or t
  misc_feature (579)..(579): n is a, c, g, or t
  misc_feature (584)..(584): n is a, c, g, or t
  misc_feature (612)..(612): n is a, c, g, or t
  misc_feature (619)..(619): n is a, c, g, or t
  misc_feature (647)..(647): n is a, c, g, or t
  misc_feature (664)..(664): n is a, c, g, or t
aaagganttaggaacaacatttcacatagnnccccaatgnttaaatnccttggtgtgantaaacccaggnnnttgaagatntntttgacagaatttaaagtnttttgangaaggaattggnaaanatctcagaggntgaaggncctcccaggcnnatggantgttnggattattatggtaaaaatgccatttgcagaaagcattgtacgattcaatgcaccccccnnnnnnnnnnnnnnnnnnnnnnnnnnnnnnnnnnnnnnnnnnnnnnnnnnnnnnnnnnnnnnnggaatcatcaattgtgacntccagctntantacannnnnnnnnnnnnnnnnnnnnnnnnnnnnnnnnnnnnnnnnnnnnnnnnnnnnnnnnnnnnnnnnnnnnnnnnnnnnnnnnnnnnnnnnnnnnnnnnnnnnnnnnnnnnnnnnnnnnnnnnnnnnnnnnnnnnnnnnnnnnnnnnnnnnnnnnnnnnnnnnnnnnnnnnnnnnnnnnnnnnnnnnnnnnnnnnnnnnnnnnnnnnnnnnnnnnnnnnnnnnnnnnnnnnnnnnnnnnnnnnnnngcntgtgcnctanatcantagttcaaccccttaaagtgctcaacanttggttntgcatgccagtgtgggctgaaagacttnacctgtaggtttgggcngctagaaagatc

SEQ ID NO: 334 - DNA, 842 bp, Artificial Sequence
  Description of Artificial Sequence: Note = Synthetic Construct
  misc_feature (13)..(13): n is a, c, g, or t
  misc_feature (16)..(16): n is a, c, g, or t
  misc_feature (28)..(28): n is a, c, g, or t
  misc_feature (70)..(70): n is a, c, g, or t
  misc_feature (75)..(75): n is a, c, g, or t
  misc_feature (77)..(77): n is a, c, g, or t
  misc_feature (80)..(80): n is a, c, g, or t
  misc_feature (84)..(84): n is a, c, g, or t
  misc_feature (88)..(88): n is a, c, g, or t
  misc_feature (92)..(93): n is a, c, g, or t
  misc_feature (100)..(100): n is a, c, g, or t
  misc_feature (109)..(109): n is a, c, g, or t
  misc_feature (114)..(114): n is a, c, g, or t
  misc_feature (128)..(128): n is a, c, g, or t
  misc_feature (134)..(134): n is a, c, g, or t
  misc_feature (138)..(139): n is a, c, g, or t
  misc_feature (143)..(143): n is a, c, g, or t
  misc_feature (145)..(145): n is a, c, g, or t
  misc_feature (149)..(149): n is a, c, g, or t
  misc_feature (153)..(153): n is a, c, g, or t
  misc_feature (159)..(160): n is a, c, g, or t
  misc_feature (165)..(165): n is a, c, g, or t
  misc_feature (170)..(171): n is a, c, g, or t
  misc_feature (174)..(174): n is a, c, g, or t
  misc_feature (179)..(179): n is a, c, g, or t
  misc_feature (193)..(193): n is a, c, g, or t
  misc_feature (199)..(199): n is a, c, g, or t
  misc_feature (205)..(206): n is a, c, g, or t
  misc_feature (211)..(211): n is a, c, g, or t
  misc_feature (244)..(245): n is a, c, g, or t
  misc_feature (251)..(251): n is a, c, g, or t
  misc_feature (254)..(255): n is a, c, g, or t
  misc_feature (258)..(258): n is a, c, g, or t
  misc_feature (269)..(269): n is a, c, g, or t
  misc_feature (272)..(272): n is a, c, g, or t
  misc_feature (302)..(302): n is a, c, g, or t
  misc_feature (312)..(312): n is a, c, g, or t
  misc_feature (317)..(317): n is a, c, g, or t
  misc_feature (321)..(321): n is a, c, g, or t
  misc_feature (324)..(324): n is a, c, g, or t
  misc_feature (326)..(326): n is a, c, g, or t
  misc_feature (336)..(336): n is a, c, g, or t
  misc_feature (346)..(347): n is a, c, g, or t
  misc_feature (354)..(355): n is a, c, g, or t
  misc_feature (359)..(360): n is a, c, g, or t
  misc_feature (377)..(377): n is a, c, g, or t
  misc_feature (380)..(380): n is a, c, g, or t
  misc_feature (388)..(388): n is a, c, g, or t
  misc_feature (391)..(392): n is a, c, g, or t
  misc_feature (395)..(396): n is a, c, g, or t
  misc_feature (398)..(398): n is a, c, g, or t
  misc_feature (405)..(405): n is a, c, g, or t
  misc_feature (410)..(410): n is a, c, g, or t
  misc_feature (413)..(413): n is a, c, g, or t
  misc_feature (418)..(418): n is a, c, g, or t
  misc_feature (423)..(423): n is a, c, g, or t
  misc_feature (425)..(425): n is a, c, g, or t
  misc_feature (431)..(431): n is a, c, g, or t
  misc_feature (453)..(453): n is a, c, g, or t
  misc_feature (455)..(455): n is a, c, g, or t
  misc_feature (457)..(457): n is a, c, g, or t
  misc_feature (462)..(464): n is a, c, g, or t
  misc_feature (474)..(474): n is a, c, g, or t
  misc_feature (479)..(479): n is a, c, g, or t
  misc_feature (484)..(484): n is a, c, g, or t
  misc_feature (490)..(490): n is a, c, g, or t
  misc_feature (500)..(501): n is a, c, g, or t
  misc_feature (506)..(506): n is a, c, g, or t
  misc_feature (512)..(512): n is a, c, g, or t
  misc_feature (514)..(514): n is a, c, g, or t
  misc_feature (517)..(517): n is a, c, g, or t
  misc_feature (524)..(524): n is a, c, g, or t
  misc_feature (533)..(533): n is a, c, g, or t
  misc_feature (538)..(538): n is a, c, g, or t
  misc_feature (544)..(545): n is a, c, g, or t
  misc_feature (548)..(548): n is a, c, g, or t
  misc_feature (551)..(551): n is a, c, g, or t
  misc_feature (554)..(554): n is a, c, g, or t
  misc_feature (563)..(563): n is a, c, g, or t
  misc_feature (567)..(568): n is a, c, g, or t
  misc_feature (571)..(571): n is a, c, g, or t
  misc_feature (599)..(599): n is a, c, g, or t
  misc_feature (601)..(601): n is a, c, g, or t
  misc_feature (616)..(616): n is a, c, g, or t
  misc_feature (632)..(633): n is a, c, g, or t
  misc_feature (636)..(637): n is a, c, g, or t
  misc_feature (639)..(639): n is a, c, g, or t
  misc_feature (642)..(642): n is a, c, g, or t
  misc_feature (649)..(649): n is a, c, g, or t
  misc_feature (655)..(655): n is a, c, g, or t
  misc_feature (660)..(660): n is a, c, g, or t
  misc_feature (666)..(666): n is a, c, g, or t
  misc_feature (669)..(670): n is a, c, g, or t
  misc_feature (678)..(678): n is a, c, g, or t
  misc_feature (681)..(681): n is a, c, g, or t
  misc_feature (683)..(683): n is a, c, g, or t
  misc_feature (687)..(687): n is a, c, g, or t
  misc_feature (694)..(694): n is a, c, g, or t
  misc_feature (696)..(696): n is a, c, g, or t
  misc_feature (701)..(702): n is a, c, g, or t
  misc_feature (726)..(726): n is a, c, g, or t
  misc_feature (728)..(728): n is a, c, g, or t
  misc_feature (733)..(733): n is a, c, g, or t
  misc_feature (739)..(739): n is a, c, g, or t
  misc_feature (749)..(749): n is a, c, g, or t
  misc_feature (753)..(753): n is a, c, g, or t
  misc_feature (764)..(764): n is a, c, g, or t
  misc_feature (777)..(777): n is a, c, g, or t
  misc_feature (784)..(784): n is a, c, g, or t
  misc_feature (787)..(787): n is a, c, g, or t
  misc_feature (790)..(790): n is a, c, g, or t
  misc_feature (795)..(795): n is a, c, g, or t
  misc_feature (805)..(805): n is a, c, g, or t
  misc_feature (810)..(810): n is a, c, g, or t
  misc_feature (817)..(817): n is a, c, g, or t
  misc_feature (819)..(822): n is a, c, g, or t
  misc_feature (825)..(825): n is a, c, g, or t
  misc_feature (839)..(839): n is a, c, g, or t
aactttgctcggnccngtggcggccganatagccgggcggctccccgggctgaggaattcgatatccggngtggncnatnctcncctntgcnnacggttnctgacattnggtcngaacttttcgtctntcactnatgnntttntncatncccngcaaanntgtcnaagtnncgnatagntcagttctgacccngatgantctacnntcagntagaactctcacattcaactgcacacatcggtnngcgctnttnngcnccgaccagctnaancgtagagcacaaagaacctcgacacggcantcgactcccnctctncatnaantntcacgggtanccatgtctanntcatganntctnncagttgcatccagaccntgnagactcgntgnnccnngngaaggtntcatnttncatgnatganantccgtnagcaggggtcctacaggttcangncnagatnnncatcgtcagncatgngcgcnttgacntggagacaanntcggnaggtangntgnccagaanctcatcggnacatnatcctnntcnacngtncaggatttnaatnnagnacctgctctctgcaatacatgtttcccntntcggcaatgggaagnatccgggtaatggtannttnngnccncctggancaaccntgggngatacntcnngacattgnggngngttntgttggncnatctnncccggaaattccctatttttggcnanttttncgcccnctaaaagggngaanaatgttccaanggaaccctttttngaaattncanccncttgnatttggattnttttngggaaancnnnnggngttttttaataaanatt

SEQ ID NO: 335 - DNA, 76 bp, Artificial Sequence
  Description of Artificial Sequence: Note = Synthetic Construct
  misc_feature (5)..(5): n is a, c, g, or t
  misc_feature (7)..(7): n is a, c, g, or t
  misc_feature (9)..(9): n is a, c, g, or t
  misc_feature (24)..(24): n is a, c, g, or t
  misc_feature (30)..(30): n is a, c, g, or t
  misc_feature (37)..(37): n is a, c, g, or t
  misc_feature (40)..(40): n is a, c, g, or t
  misc_feature (46)..(46): n is a, c, g, or t
  misc_feature (65)..(65): n is a, c, g, or t
  misc_feature (67)..(67): n is a, c, g, or t
  misc_feature (74)..(74): n is a, c, g, or t
ttacntnanggctagctcatttcnaacccnatagtcncgntcatangaactctctcattaacgtnanacatcgnta

SEQ ID NO: 336 - DNA, 248 bp, Artificial Sequence
  Description of Artificial Sequence: Note = Synthetic Construct
  misc_feature (3)..(3): n is a, c, g, or t
  misc_feature (14)..(14): n is a, c, g, or t
  misc_feature (34)..(34): n is a, c, g, or t
  misc_feature (76)..(76): n is a, c, g, or t
  misc_feature (79)..(79): n is a, c, g, or t
  misc_feature (83)..(83): n is a, c, g, or t
  misc_feature (85)..(85): n is a, c, g, or t
  misc_feature (88)..(88): n is a, c, g, or t
  misc_feature (91)..(93): n is a, c, g, or t
  misc_feature (98)..(98): n is a, c, g, or t
  misc_feature (100)..(100): n is a, c, g, or t
  misc_feature (110)..(110): n is a, c, g, or t
  misc_feature (167)..(167): n is a, c, g, or t
  misc_feature (171)..(172): n is a, c, g, or t
  misc_feature (177)..(177): n is a, c, g, or t
  misc_feature (179)..(179): n is a, c, g, or t
  misc_feature (181)..(181): n is a, c, g, or t
  misc_feature (196)..(196): n is a, c, g, or t
  misc_feature (202)..(202): n is a, c, g, or t
  misc_feature (209)..(209): n is a, c, g, or t
  misc_feature (212)..(212): n is a, c, g, or t
  misc_feature (218)..(218): n is a, c, g, or t
  misc_feature (237)..(237): n is a, c, g, or t
  misc_feature (239)..(239): n is a, c, g, or t
  misc_feature (246)..(246): n is a, c, g, or t
canaaatttgctcngggcccgtgtggcggccganatagccgggcggcctccccgggctgcaggaattcgatatccngtntggncnatnctnnnctgtncnatcggttccngacattgatctgacacttttctattctcagttatgtatttttccatgccttgcaaantggnnttacntnanggctagctcatttcnaacccnatagtcncgntcatangaactctctcattaacgtnanacatcgnta

SEQ ID NO: 337 - DNA, 429 bp, Artificial Sequence
  Description of Artificial Sequence: Note = Synthetic Construct
ttcggcacagggaacggaggacagtgcctggcagatagaaagcagatataaagtcaagtctcgagtctgttccacatggccgcagatagtgttccaaacagcaaagactctagagaagaaaaataccatcaagtcatttagtcagctggacggcaggaccgggtgtcttggaagtcctagccctgaggaagatttgaggttatgcagctttcaagaggaaggtattttgtatttcctggggaagctgccatcccaggaactgagagtggatcagaagatgtttcaggatacttacttctgatctcatggcggggcatcacaccagacccattacatgcatgctgggagaacagagcaaccttcaatccctatacacgggctacttaaccctcttggtctcctctttctggcagaaggagcacagagcag

SEQ ID NO: 338 - DNA, 1834 bp, Artificial Sequence
  Description of Artificial Sequence: Note = Synthetic Construct
gaaaaatccttgtggttaacagcagaggcttcagagtgtaacctgtactcgggcctagaaattatttaaaatggcgactgatacgtctcaaggtgaactcgtccatcctaaggcactcccacttatagtaggagctcagctgatccacgcggacaagttaggtgagaaggtagaagatagcaccatgccgattcgtcgaactgtgaattctacccgggaaactcctcccaaaagcaagcttgctgaaggggaggaagaaaagccagaaccagacataagttcagaggaatctgtctccactgtagaagaacaagagaatgaaactccacctgctacttcgagtgaggcagagcagccaaagggggaacctgagaatgaagagaaggaagaaaataagtcttctgaggaaaccaaaaaggatgagaaagatcagtctaaagaaaaggagaagaaagtgaaaaaaacaattccttcctgggctaccctttctgccagccagctagccagggcccagaaacaaacaccgatggcttcttccccacgtcccaagatggatgcaatcttaactgaggccattaaggcatgcttccagaagagtggtgcatcagtggttgctattcgaaaatacatcatccataagtatccttctctggagctggagagaaggggttatctccttaaacaagcactgaaaagagaattaaatagaggagtcatcaaacaggttaaaggaaaaggtgcttcttggaagttttgttgtggttcagaaatcaagaaaaaacacctcagaaatccagaaaacagaaagaataggagctctgcagtggatccagaaccacaagtaaaattggaggatggtctcccactggcctttactcgcctttgtgaacctaaagaagcttcctacagtctcatcaggaaatatgtgtctcagtattatcctaagcttagagtggacatcaggcctcagctgttgaagaacgctctgcagagagcagtagagaggggccagttagaacagataactggcaaaggtgcttcggggacattccagctgaagaaatcaggggagaaacccctgcttggtggaagcctgatggaatatgcaatcttgtctgccattgctgccatgaatgagccgaagacctgctctaccactgctctgaagaagtatgtcctagagaatcacccaggaaccaattctaactatcaaatgcatttgctgaaaaaaaccctgcagaaatgcgaaaagaatgggtggatggaacagatctctgggaaagggttcagtggcaccttccagctctgttttccctattatcccagcccaggagttctgtttccgaagaaagagccagatgattctagagatgaggatgaagatgaagatgagtcatcagaagaagactctgaggatgaagagccgccacctaagagaaggttgcagaagaaaaccccagccaagtccccagggaaggccgcatctgtgaagcagagagggtccaaacctgcacctaaagtctcagctgcccagcgggggaaagctaggcccttgcctaagaaagcacctcctaaggccaaaacgcctgccaagaagaccagaccctcatccacagtcatcaagaaacctagtggtggctcctcaaagaagcctgcaaccagtgcaagaaaggaagtaaaattgccgggcaagggcaaatccaccatgaagaagtctttcagagtgaaaaagtaaattttataggaaaaaagggtatgatgatgaaattcaaaatcttattttctaagcacttttgatatcaagcaagtggcttcctttttgagatattaaaac

SEQ ID NO: 339 - DNA, 266 bp, Artificial Sequence
  Description of Artificial Sequence: Note = Synthetic Construct
tttcaagcttatattttatttcttgcctctgacaaccaggaggccatgccagagagatacatgtaaggaatgagaacagctgcccctgagaattaaccagagatcttctgcccagccccagcctcccacccccagagagctagtgactcactccaccagaattctctcatccagttctggtatttgcttggggttggagactggaagctattggcccgttgcagagctgcgtgcacagctctgggctcctcagggcactgtggaga

SEQ ID NO: 340 - DNA, 998 bp, Artificial Sequence; identical to SEQ ID NO: 204
  Description of Artificial Sequence: Note = Synthetic Construct
  misc_feature (536)..(536): n is a, c, g, or t
  misc_feature (623)..(623): n is a, c, g, or t
  misc_feature (632)..(633): n is a, c, g, or t
  misc_feature (727)..(727): n is a, c, g, or t
  misc_feature (759)..(759): n is a, c, g, or t
  misc_feature (837)..(837): n is a, c, g, or t
  misc_feature (842)..(842): n is a, c, g, or t
  misc_feature (916)..(916): n is a, c, g, or t
  misc_feature (944)..(944): n is a, c, g, or t
  misc_feature (947)..(947): n is a, c, g, or t
  misc_feature (968)..(969): n is a, c, g, or t
  misc_feature (991)..(991): n is a, c, g, or t
  misc_feature (994)..(994): n is a, c, g, or t

SEQ ID NO: 341 - DNA, 362 bp, Artificial Sequence
  Description of Artificial Sequence: Note = Synthetic Construct
catatttttacatttctctgaggaatgtcctccctgctacaacattaataactccatgataaccagagacagcatgagtctgggaggtctcagcatattggtaaaagctgggacctttaggacagcccttaaggtgtggaaaagaactctaaaaacatgagttgaaaatatataatttctcaactatgcaaaaatacaaggatgtaatatgaattgcataaggggcttcacagatctaaaggaacagaggcagctgaactgtgagacagcttgtgaggaagacactaaggaaataaagagtggtgatcgaaagctgagatcacactcagctaagtttgggttttgttttgttttctgtttag

SEQ ID NO: 342 - DNA, 362 bp, Artificial Sequence; identical to SEQ ID NO: 341
  Description of Artificial Sequence: Note = Synthetic Construct

SEQ ID NO: 343 - DNA, 250 bp, Artificial Sequence
  Description of Artificial Sequence: Note = Synthetic Construct
  misc_feature (3)..(3): n is a, c, g, or t
  misc_feature (23)..(23): n is a, c, g, or t
  misc_feature (30)..(32): n is a, c, g, or t
  misc_feature (35)..(35): n is a, c, g, or t
  misc_feature (37)..(37): n is a, c, g, or t
  misc_feature (45)..(45): n is a, c, g, or t
  misc_feature (50)..(50): n is a, c, g, or t
  misc_feature (69)..(69): n is a, c, g, or t
  misc_feature (78)..(78): n is a, c, g, or t
  misc_feature (87)..(87): n is a, c, g, or t
  misc_feature (96)..(96): n is a, c, g, or t
  misc_feature (108)..(108): n is a, c, g, or t
  misc_feature (127)..(127): n is a, c, g, or t
  misc_feature (136)..(136): n is a, c, g, or t
  misc_feature (165)..(165): n is a, c, g, or t
  misc_feature (181)..(181): n is a, c, g, or t
  misc_feature (187)..(187): n is a, c, g, or t
  misc_feature (197)..(197): n is a, c, g, or t
  misc_feature (207)..(207): n is a, c, g, or t
  misc_feature (211)..(211): n is a, c, g, or t
  misc_feature (214)..(214): n is a, c, g, or t
  misc_feature (227)..(227): n is a, c, g, or t
  misc_feature (236)..(236): n is a, c, g, or t
aanatattaccgccacgattctnttcccgnnnaancnggaatacncccanttgcagacttaaacgcccnccttgaaancttctcggngaaaacccncaggaacttacnctgtgagatcagttcgatntacccattntgcaccaatgacttcagcatctttacttncacaggttctggtganaaaacngaagcaaatncccaaaaagngatnagnccgacacgaaatnttgaatacncaacctcctttcca

SEQ ID NO: 344 - DNA, 2012 bp, Artificial Sequence
  Description of Artificial Sequence: Note = Synthetic Construct
attttcacaacagcctcctgagtcccatcattatcatggtttataggtgaggaaattgagactagggtggtgaagtcacttgcctcaagatgaacagctggtagatcacatgcgtggtggcaccgggtgtggccctggaggactcgtgctagtggatctgtttttctagtgattcttttgttttgtcccttagagtgatgatgcgggtgtgctggttggtgagacaggacagccggcaccagcgaatcagacttccacatttggaagcagttgtgattgggcgtggcccagagaccaagatcactgataagaaatgttctcgacagcaagtacagttgaaagcagagtgtaacaagggatatgtcaaggtaaagcagagtttgaggaagaggcaaagaaccctggcctggaaacacacaggaagagaaagagatcaggcaacagtgattctatagaaagggatgctgctcaggaagctgaggctgggacagggctggaacctgggagcaactctggccaatgctctgtgcccctaaagaagggaaaagatgcacctatcaaaaaggaatccctgggccactggagtcaaggcttgaagatttctatgcaggaccccaaaatgcaggtttacaaagatgagcaggtggtggtgataaaggataaatacccaaaggcccgttaccattggctggtcttaccgtggacctccatttccagtctgaaggctgtggccagggaacaccttgaactccttaagcatatgcacactgtgggggaaaaggtgattgtagattttgctgggtccagcaaactccgcttccgattgggctaccacgccattccgagtatgagccatgtacatcttcatgtgatcagccaggattttgattctccttgccttaaaaacaaaaaacattggaattctttcaatacagaatacttcctagaatcacaagctgtgatcgagatggtacaagaggctggtagagtaactgtccgagatgggatgcctgagctcttgaagctgccccttcgttgtcatgagtgccagcagctgctgccttccattcctcagctgaaagaacatctcaggaagcactggacacagtgattctgcagagcctgagctgctgctgtggtgtggcccactggagcaaactgctggcacctattctgggttgcttgtgaacttctactcatttcctaaattaaaacatgcagctttttcacaaatttattctattattgagtggccacaatgtagagtggctcaaagtacttcaggattaggaatttgggtttgtcatagatgtattctctggtgagggtggctgggatatacctgacccaccatcttcagaaggacccatgtcaggtctgaccattgggagcaaagccatgttcacactgacctaatgcagagtatggaagcattgggctggttatacatttctgtttcttagatttatcctccgcctctgtaggcatggacaacctttaatcagagcatctagagtggcctcttgtttatcctgaaggtactgatgggtcttgttttctgttagtctgttttgtaatattcttttcccttccttcatggggaggcttagtttgtccagtccttccatgcccttctatcccagattacctaaatgttcccttctcaggaattctgtactcatcagttcttcacagtgagaaaagaggctagatgatggtgtggggggttggagttttcttctaataccgagggttcctggctgtgaggaaacagccacatgttcgtcatgattgagctgtgaagtcttcttggacctgttgtctgaaaataaagttaatttgtttgaggcatctctcttaagtaggtggaaactattgaagttcagctaacaatcacagcataggttctgatgcatggaaaggtggttggtgaatgaaaaagttgcgtagagccactactttctttttccctgagaataaatttggataaaaaaaaaaaaaaaaaaaaaaaa

SEQ ID NO: 345 - DNA, 1534 bp, Artificial Sequence
  Description of Artificial Sequence: Note = Synthetic Construct
  misc_feature (391)..(391): n is a, c, g, or t
attcgtcgacatcaccccacccggctcctgtacctagttggctgccagatcagcatgaaaagatttagagataagagtggacaaagtcatgcagcggggctgttcagcctgacaggaaagtgtttctgccagaaacgccttccaagagtaactcgaggtgcactagcagtgtccccagcgggccttaagaatgccggaagcagtagctaagatgcgagtgtgctggttggtgagacaggacagcaggcaccagcgaatcaaacttccccatttggaagctgttgtgattggtcgaagcccagagaccaagatcacagataagaaatgttcccgacagcaagtacagttgaaagcagagtgtaacaagggatatgtcaaagtacagcagatngggggtcaaccccaccagcattgactcgggcgtcatcgggaaggaccaagagaagaagctgctgcctggtcagttctccacatggtgaatggactttatccatacatcgtagagtttgaggaagtggcagagagccctaacctaacacagaggaagagaaagaggtcagactgtgatagtgaggagatggaagctgagtctgggacagggctggcacctgggagcagccccagccagtgctctgtgtcccctaagaaggacaagaatggagccaccaaaaaggaatcactgggccactggagtcaaggcttgaagatgtctatgaaagaccccaaaatgcaggtttacaaagacgaccaggtggtggtgattaaggataaataccccaaggcccgtcaccactggctggtcttaccgtgggcctccatttccagtctgaaggttgtgaccagtgaacaccttgaacttctcaaacatatgcacgctgtgggggagaaggtgatagcagattttgctggatccagcaaactgcgcttccgattgggctaccatgccattcccagcatgagccacgtacatcttcatgtgatcagccaggattttgattctccttgccttaaaaacaaaaagcattggaattcttttaatacagaatactttctggaatcacaagctgtgatcaagatggttcaggaagccggcagagtgactgttaaagatggcacttgtgagctcttgaagctgcctctccgttgccatgagtgtcagcagctgctgccttccatcccgcagctgaaagagcacctcaggaagcactggggcgggtgaactcgtctcggcgaccaagggcagtgctagcatctgtccgcattgcctatgctccgttcaatcctgaactaaagcgtacacttcttcgaaacaaagcttatttattcttgagcagccacacattgggtgcattctggtgcaggaactgggaattcgggttttgtgggtgtattttctggtaatggaggctgaacatgcctggtcacccttcccaggaccatgacaggcctgactaatgagagggcaaacccggcttgagactcaaatgcacgatgtagaagcagaggattggtaatatattttgttcctaccctc

SEQ ID NO: 346 - DNA, 546 bp, Artificial Sequence
  Description of Artificial Sequence: Note = Synthetic Construct
gttaaatatgaaaaagtgggggtgacagggggtgataccctttgcgccgggctatggatttttggcaccgataagattttcaggtgacatggaaggtggttggggatgggggaaagttttgaggggccaaaaggataaggaggatgattgattggtttgggagcagtacttggaaagagtgtgtttgatcggtaaacaaccacgtgtagtgtgtttttgttgcagcagagataagtgagaaaaagatttcaggagatcttgatttttttcgggtcgagctatgttgggggatgtgagggtacaattcacaagatttgttcacagggagttctaggaggtggtcccattagccggtaggggggttttctcaataaatgggttcagtcaggtgtttgcctagatctttcattagttcctcccttcaaagggattttgaaggagtgctttgtcctgtggagcaattgactcaatcaataaacttaagtaatctcccggattactgttgatgcgttcccagagaggtcccccgtagttaccagtgaatca

SEQ ID NO: 347 - DNA, 417 bp, Artificial Sequence
  Description of Artificial Sequence: Note = Synthetic Construct
tttgttatatccaaatcagacttttaattttcacagatatgccaaattgtctgttccaaagatgggcatcacaatacatcccattccatgtgcttctcttgctatgtaacactgacactccttccaacaggtggtagaagtctgtcttctccccgtgctcctaggaagaccttcatgtcctccttgaccaacaggggatggtggaagtgactctgtgtgacttgtgagacaagattctaaaagtcatgcacttctgccttgttctcttgggataactgctcttggaacccagccattgcagtgaggaagtcaaatagctccatggacatgccatgtgtaggtgttctggcaaacagccccaggtgaggttccaactgacagccaacgtcaaccacctgacgagaatgagtcttccag

SEQ ID NO: 348 - DNA, 401 bp, Artificial Sequence
  Description of Artificial Sequence: Note = Synthetic Construct
accatttaagatattttaataaaatatcagataataaaaatatacctttgtgtttgaagagtcaagtcacacaaatacgtaagagcaaatcaattgtttccagctgtaatcagcgataataacccaagtacgtgacagcatgagaaagacgatcagtttccttttgaggttacatgataagcagcagctaagcagcctttttctctaagaactcgccgtctgacctcgtggcaagaggaggccagcccctctcactggcgccctttatagcgttcgctttcagttctccactctagtgaggacgggggcgggggaagctaagagcctgttttctaaaatgcagaatacggtcatcctctctttcgaaccgggttgcgtgggcactgaggagggccagagga

SEQ ID NO: 349 - DNA, 987 bp, Artificial Sequence
  Description of Artificial Sequence: Note = Synthetic Construct
tggacatacagctctaaatatagatacagagaggtctgccgtgacagttcagtaggagactggaaatacttttgctttctgtatcgatagtactttctttcctttttaaagagaaggtttcgttttgatcttgagaaattctgataaaaccaccaactgaaaacctgccattataaaggagggatttcacaacgttcattccaaaaaactgtgggctatttcatttctgggaagtgattcactgcaggaaggaatcgctgtttggggggtgggaggggagcgttgatttttagaagccagcctgccctctgagaagtgagcagcaacctctgagatggcagccacgtgccttttgacccccagccctgctccctgaatcaccacccctcgagatgacacgcagtgaccaatttcctcttaaaactccccttcttttcaaaaacccctatgatccatgcacccctctgtctaatcctctgcgatggggccagtctgcaagatccgtctgggcgggctgcggtagcattctccacctgccaacactcagttgctggtgagtaaccagcatacggatctcacttcctaggcagggtctcacttcatctcagcctccagagtagctgaaactacaggtcacccaggcatggaatgcacagctctgccagacagaaagcgctttggatgcctgagaaacaacagcttgtccgggctactgatgcgaagagaggccatggtttcctttttttctgctctgaatggcagccttgacgtcacaacagctaggaacccctggagggacaaataacaaggggcaagccaaaagcgccctgctctgtcgcaggggcagggccattttcatccagttttgatgtcttctgtggcccctgcgagtcggcgggagtaaagacaaatgactggagctttaggggtaaaggcggtctctttttaggctgatcaaacaaacttgtttctgatgaactagacttc

SEQ ID NO: 350 - DNA, 925 bp, Artificial Sequence; identical to SEQ ID NO: 48
  Description of Artificial Sequence: Note = Synthetic Construct
  misc_feature (8)..(8): n is a, c, g, or t
  misc_feature (13)..(13): n is a, c, g, or t
  misc_feature (18)..(18): n is a, c, g, or t
  misc_feature (24)..(24): n is a, c, g, or t
  misc_feature (27)..(27): n is a, c, g, or t
  misc_feature (53)..(53): n is a, c, g, or t
  misc_feature (56)..(57): n is a, c, g, or t
  misc_feature (63)..(63): n is a, c, g, or t
  misc_feature (66)..(66): n is a, c, g, or t
  misc_feature (72)..(72): n is a, c, g, or t
  misc_feature (77)..(77): n is a, c, g, or t
  misc_feature (84)..(84): n is a, c, g, or t
  misc_feature (88)..(88): n is a, c, g, or t
  misc_feature (93)..(94): n is a, c, g, or t
  misc_feature (117)..(117): n is a, c, g, or t
  misc_feature (132)..(132): n is a, c, g, or t
  misc_feature (143)..(143): n is a, c, g, or t
  misc_feature (158)..(158): n is a, c, g, or t
  misc_feature (168)..(168): n is a, c, g, or t
  misc_feature (177)..(177): n is a, c, g, or t
  misc_feature (182)..(182): n is a, c, g, or t
  misc_feature (208)..(208): n is a, c, g, or t
  misc_feature (234)..(234): n is a, c, g, or t
  misc_feature (239)..(240): n is a, c, g, or t
  misc_feature (243)..(243): n is a, c, g, or t
  misc_feature (247)..(247): n is a, c, g, or t
  misc_feature (252)..(252): n is a, c, g, or t
  misc_feature (275)..(275): n is a, c, g, or t
  misc_feature (284)..(284): n is a, c, g, or t
  misc_feature (288)..(288): n is a, c, g, or t
  misc_feature (295)..(296): n is a, c, g, or t
  misc_feature (302)..(302): n is a, c, g, or t
  misc_feature (308)..(309): n is a, c, g, or t
  misc_feature (319)..(319): n is a, c, g, or t
  misc_feature (331)..(332): n is a, c, g, or t
  misc_feature (335)..(335): n is a, c, g, or t
  misc_feature (341)..(341): n is a, c, g, or t
  misc_feature (345)..(345): n is a, c, g, or t
  misc_feature (347)..(347): n is a, c, g, or t
  misc_feature (358)..(358): n is a, c, g, or t
  misc_feature (361)..(362): n is a, c, g, or t
  misc_feature (375)..(375): n is a, c, g, or t
  misc_feature (401)..(401): n is a, c, g, or t
  misc_feature (404)..(404): n is a, c, g, or t
  misc_feature (444)..(444): n is a, c, g, or t
  misc_feature (448)..(449): n is a, c, g, or t
  misc_feature (452)..(452): n is a, c, g, or t
  misc_feature (460)..(460): n is a, c, g, or t
  misc_feature (466)..(466): n is a, c, g, or t
  misc_feature (475)..(475): n is a, c, g, or t
  misc_feature (497)..(497): n is a, c, g, or t
  misc_feature (508)..(508): n is a, c, g, or t
  misc_feature (512)..(512): n is a, c, g, or t
  misc_feature (520)..(520): n is a, c, g, or t
  misc_feature (528)..(528): n is a, c, g, or t
  misc_feature (535)..(535): n is a, c, g, or t
  misc_feature (541)..(541): n is a, c, g, or t
  misc_feature (548)..(548): n is a, c, g, or t
  misc_feature (551)..(551): n is a, c, g, or t
  misc_feature (558)..(558): n is a, c, g, or t
  misc_feature (567)..(567): n is a, c, g, or t
  misc_feature (570)..(570): n is a, c, g, or t
  misc_feature (572)..(572): n is a, c, g, or t
  misc_feature (575)..(575): n is a, c, g, or t
  misc_feature (578)..(581): n is a, c, g, or t
  misc_feature (586)..(586): n is a, c, g, or t
  misc_feature (588)..(588): n is a, c, g, or t
  misc_feature (596)..(596): n is a, c, g, or t
  misc_feature (598)..(598): n is a, c, g, or t
  misc_feature (602)..(602): n is a, c, g, or t
  misc_feature (612)..(612): n is a, c, g, or t
  misc_feature (619)..(619): n is a, c, g, or t
  misc_feature (623)..(623): n is a, c, g, or t
  misc_feature (630)..(630): n is a, c, g, or t
  misc_feature (637)..(637): n is a, c, g, or t
  misc_feature (655)..(655): n is a, c, g, or t
  misc_feature (657)..(657): n is a, c, g, or t
  misc_feature (663)..(663): n is a, c, g, or t
  misc_feature (673)..(673): n is a, c, g, or t
  misc_feature (704)..(704): n is a, c, g, or t
  misc_feature (714)..(714): n is a, c, g, or t
  misc_feature (719)..(719): n is a, c, g, or t
  misc_feature (735)..(735): n is a, c, g, or t
  misc_feature (743)..(743): n is a, c, g, or t
  misc_feature (756)..(756): n is a, c, g, or t
  misc_feature (772)..(772): n is a, c, g, or t
  misc_feature (792)..(792): n is a, c, g, or t
  misc_feature (801)..(801): n is a, c, g, or t
  misc_feature (816)..(816): n is a, c, g, or t
  misc_feature (833)..(833): n is a, c, g, or t
  misc_feature (840)..(840): n is a, c, g, or t
  misc_feature (853)..(853): n is a, c, g, or t
  misc_feature (856)..(856): n is a, c, g, or t
  misc_feature (858)..(858): n is a, c, g, or t
  misc_feature (868)..(868): n is a, c, g, or t
  misc_feature (883)..(883): n is a, c, g, or t
  misc_feature (910)..(910): n is a, c, g, or t
  misc_feature (919)..(919): n is a, c, g, or t

SEQ ID NO: 351 - DNA, 882 bp, Artificial Sequence
  Description of Artificial Sequence: Note = Synthetic Construct
  misc_feature (9)..(9): n is a, c, g, or t
  misc_feature (19)..(19): n is a, c, g, or t
  misc_feature (33)..(33): n is a, c, g, or t
  misc_feature (44)..(44): n is a, c, g, or t
  misc_feature (46)..(46): n is a, c, g, or t
  misc_feature (55)..(55): n is a, c, g, or t
  misc_feature (86)..(86): n is a, c, g, or t
  misc_feature (103)..(104): n is a, c, g, or t
  misc_feature (107)..(107): n is a, c, g, or t
  misc_feature (114)..(114): n is a, c, g, or t
  misc_feature (117)..(117): n is a, c, g, or t
  misc_feature (123)..(124): n is a, c, g, or t
  misc_feature (132)..(132): n is a, c, g, or t
  misc_feature (136)..(136): n is a, c, g, or t
  misc_feature (191)..(191): n is a, c, g, or t
  misc_feature (214)..(214): n is a, c, g, or t
  misc_feature (228)..(228): n is a, c, g, or t
  misc_feature (233)..(233): n is a, c, g, or t
  misc_feature (235)..(235): n is a, c, g, or t
  misc_feature (238)..(238): n is a, c, g, or t
  misc_feature (247)..(247): n is a, c, g, or t
  misc_feature (266)..(266): n is a, c, g, or t
  misc_feature (275)..(275): n is a, c, g, or t
  misc_feature (284)..(284): n is a, c, g, or t
  misc_feature (290)..(290): n is a, c, g, or t
  misc_feature (317)..(317): n is a, c, g, or t
  misc_feature (320)..(320): n is a, c, g, or t
  misc_feature (358)..(358): n is a, c, g, or t
  misc_feature (362)..(362): n is a, c, g, or t
  misc_feature (364)..(364): n is a, c, g, or t
  misc_feature (370)..(370): n is a, c, g, or t
  misc_feature (384)..(384): n is a, c, g, or t
  misc_feature (424)..(424): n is a, c, g, or t
  misc_feature (469)..(469): n is a, c, g, or t
  misc_feature (555)..(555): n is a, c, g, or t
  misc_feature (728)..(728): n is a, c, g, or t
  misc_feature (745)..(745): n is a, c, g, or t
  misc_feature (753)..(753): n is a, c, g, or t
  misc_feature (760)..(760): n is a, c, g, or t
  misc_feature (869)..(869): n is a, c, g, or t
  misc_feature (877)..(877): n is a, c, g, or t
gagggttanttggcccaantcggcaatcatccngggaagaagangncagggtttnggcaaatcggaagatcaaggacgcaattcgnggggggggatggatagnngcnaaagggnacngaaagnnggattggnaggnaaaattaaacgggagttgtaatccaaaaggacgacaaggcaaaaacaaatccggnagtaagcaggaagcacagtgaanttgggggaggcagngtggngnaantaaaaaatngtttttttaatcccaatanggtcaacangtaggcaantggatntattagatattatatcttagcgcaagnttntcacccattggtccaacccatataacatggcggtggtnaatntntgagcntggcacaatttttnacccattagttcccaaggcagatcgccaccatgccagaanaaaatcccaattccatggtggcccagtgtgtccagccaccaatantttcttgaattcaattaaatcaccacatgaaggaatacataacacaataacatctgatccaattgataagatataatttgctcacntagacatacaaaatcctgtacattccatctcttaagaatattcataacaaactataaatgtgtagagaggaattttaatatccacttccatgttctcttggctgctcctctctcccagtctcctcctcctcctttaaaacttttttctcccacccatcatttttttttgtccnaaggacgggccttgttntatcctgnacctgcnttcgtctgcataaggccatcatcccacaggcaggactggagcaatggctcattggttaagagcacttgctgatcttgaagaagaccagggtgcaattctcagagcactncactgctncacac

SEQ ID NO: 352 - DNA, 689 bp, Artificial Sequence
  Description of Artificial Sequence: Note = Synthetic Construct
  misc_feature (559)..(559): n is a, c, g, or t
ctagttccctgaagcagccgtttaaccccaaccctggacccttccgagtttaagcccaccccactccgggtgccccggaccttagggttcaggaggggtgagtcagaattcagccgactttaccatggcggctaccgatcaccgcaacggccattccccatgattgatgagaataacgatgtcagcgaggaggccttgagctctgacattaagaaactgaaggagaagcatgacatgctggacaaggagatctcccagttaatagcagagggctaccgtgtgattgagctggagaagcatatctccctcctccatgagtacaatgacatcaaggatgtatcacagatgctgctggggaagctggctgtgactcgaggcgttaccaccaaggagttatatccagattttgatctaaacctgaatgactgagcagcttcttggagattttcatctacagcccacagggacaggaggatgggggcataaaaggcagagtctagacagtatgttcatatggttttcagattttaaaagatgctagaagccctccaaagtttgnggtgggttctagagaagaggagtattgggaggggtgggtattgtcaatgttaaggttcctaaacatacttgtgagtaggtgtgtgtggttgtcccttttgttaataaacatatgagcagtcaaaaagaag

SEQ ID NO: 353 - DNA, 745 bp, Artificial Sequence
  Description of Artificial Sequence: Note = Synthetic Construct
agttcacactccgggtcagagttcctggcccggtgcaccgtgagaggtcgctctccgactcccgcgctggaccctcttgcgccattgaaccccctgatccgggggcctcggaccccagggtctcaggaggactgaaccaagacttacccgaagttgccgcggggccttccgatcccctaggccattgcccaagtctggccaggctgatgggaccagcgaggagtctctgcaccttgacattcagaaactgaaggagaagagggacatgctggacaaggagatctcccagttcgtatctgaaggctacagtgtggatgaagctggaggaccacattacccagcttcacgagtacaatgacatcaaggatgtggggcagatgctgatgggcaaactagctgtgatccggaggtgtcaccaccaaagagttggtatccagagtttgggctggacatgaatgactgagcaggctcatcgccccttgtccacagcttccaaggacagaaagggtgtggacatgataaacactgagagcccaaccagcacacctacagagtttccagcgagacaattgccagaagcacttttctagagagcccaagcccaatcaggaggaggctagagaagaggcgggcagggaggaaggggcgttcccagcttcaaaggttcctgaaatgtcgcagtgatacttgtgtaagggtacatgtactttatttgtcaataaacgtatctgtacactgaaaaaaa

SEQ ID NO: 354 - DNA, 496 bp, Artificial Sequence
  Description of Artificial Sequence: Note = Synthetic Construct
ccgcggttgcgggaggccctgcgccgtgggacctggcggcgaggacgcctattccctgcttctgcgaccacagctgggcactcggaaagttgctagggccgaagaggcgggaagggaggaagggaagcgagaggcggatgcgtggaccaggcgggcagcagcctcagcccgccgaggagtgatcctccgactgtgaaaaaccagacctctggctgcctggctccctaggaatcaagaagacgcacagactgaaaatcaagggaggaaggaacaagatcaaggatgaggattagcaatctgcaaattgaactctatctaatttgcatgtttatttcttagaattgtaattaaatttgtgtaataaatgttttccatttcatttgtacacttaaaacttgggtgactgacatgcagttaagtgaatttcctttttttaaaagcaaatgtagattattcaatccaagcagcaaaccgaatattaaacataattagaact

SEQ ID NO: 355 - DNA, 610 bp, Artificial Sequence
  Description of Artificial Sequence: Note = Synthetic Construct
cacaggaagggaagtcacggtttgcacccgtgaagtctggggaggttcagagctgggaactgcccagaggaaggggttcggggctacagccatcaatctccagttgtttaaacataacgctaagtggagactcgaggcaattatccgaataatgggggaggggcactttcacctgcattatccggatcgaaagtgcggtgtggtgacaaatccggggctttttaggccctggtggttctcagcggtcttgggaatttgaacggcttttctgtcggttctgcaaaggaaattaagggagatttctagaaaggcttgacaggctatcctgcaagggggtggggggaaggctggggggcgccgcgggactcccggatcttgggtgataaaggcagggggcagatctaagatcaacaaacctagcggcgtcaggcttgggcagagggtaagaaagttcagagatgggcgccggggagaaccacaatccaatcggtcggtcaaaagaaaaagaggtgggggcgtcaagcagggagggagtaggggcgcggccgagagtcttcttgcctgtagaccgagggcccccaagtgtctggcggcgggagggcgattcatt

SEQ ID NO: 356 - DNA, 710 bp, Artificial Sequence
  Description of Artificial Sequence: Note = Synthetic Construct
  misc_feature (575)..(575): n is a, c, g, or t
  misc_feature (667)..(667): n is a, c, g, or t
gcatatactcacatccggagggttgtccctggagcagtgtctgtgtgacagcaaagggaatcaggggtgcccctggagtctctgagcactgattctgtaccctagcctgcccatgtcgtcccttgtgagtcataggcttggcttaacgttcaccatggggcacctaggaagataaagctttgggatatgtgagaccagccaggaatgcttgtgtaaactacctcaggatgaagggtaatgtttaacattccatacatgccctacttaccctggcctgtgccaggcacttacccattgtaatttacttacctatggtaataacctgctgccagatagtatcatgcctgtcttagaggcagggaaaaggagttttggacaggccaattttcatgggctctctctggaagcaagtagctaagccagaataaacccaggtctttccatgttagtcagtgtatattccaacacactgcttaacgtagacaggaaaacagaaagccaaccccaaactcggctggtgtcgcttgctggcaagtttgctaaagataagggataaggataattctctgtgctgnctcccttttattctttgacataaacaacaggagaaccctggtctgagggcttttcaggccactttgtgtcaagagcatcccctactgaacangtctgttgtgactagtctgggcaaggcccatttgtttgaaaga

SEQ ID NO: 357 - DNA, 975 bp, Artificial Sequence; identical to SEQ ID NO: 121
  Description of Artificial Sequence: Note = Synthetic Construct
  misc_feature (6)..(6): n is a, c, g, or t
  misc_feature (8)..(8): n is a, c, g, or t
  misc_feature (15)..(15): n is a, c, g, or t
  misc_feature (33)..(33): n is a, c, g, or t
  misc_feature (39)..(39): n is a, c, g, or t
  misc_feature (41)..(41): n is a, c, g, or t
  misc_feature (43)..(43): n is a, c, g, or t
  misc_feature (45)..(45): n is a, c, g, or t
  misc_feature (52)..(52): n is a, c, g, or t
  misc_feature (68)..(68): n is a, c, g, or t
  misc_feature (76)..(76): n is a, c, g, or t
  misc_feature (81)..(81): n is a, c, g, or t
  misc_feature (91)..(91): n is a, c, g, or t
  misc_feature (106)..(106): n is a, c, g, or t
  misc_feature (108)..(108): n is a, c, g, or t
  misc_feature (122)..(122): n is a, c, g, or t
  misc_feature (129)..(129): n is a, c, g, or t
  misc_feature (131)..(131): n is a, c, g, or t
  misc_feature (170)..(171): n is a, c, g, or t
  misc_feature (182)..(182): n is a, c, g, or t
  misc_feature (186)..(187): n is a, c, g, or t
  misc_feature (194)..(195): n is a, c, g, or t
  misc_feature (212)..(212): n is a, c, g, or t
  misc_feature (217)..(217): n is a, c, g, or t
  misc_feature (225)..(225): n is a, c, g, or t
  misc_feature (240)..(240): n is a, c, g, or t
  misc_feature (258)..(259): n is a, c, g, or t
  misc_feature (264)..(264): n is a, c, g, or t
  misc_feature (269)..(269): n is a, c, g, or t
  misc_feature (275)..(275): n is a, c, g, or t
  misc_feature (288)..(288): n is a, c, g, or t
  misc_feature (296)..(296): n is a, c, g, or t
  misc_feature (303)..(303): n is a, c, g, or t
  misc_feature (308)..(308): n is a, c, g, or t
  misc_feature (311)..(311): n is a, c, g, or t
  misc_feature (322)..(322): n is a, c, g, or t
  misc_feature (327)..(327): n is a, c, g, or t
  misc_feature (336)..(336): n is a, c, g, or t
  misc_feature (351)..(351): n is a, c, g, or t
  misc_feature (374)..(374): n is a, c, g, or t
  misc_feature (387)..(387): n is a, c, g, or t
  misc_feature (421)..(421): n is a, c, g, or t
  misc_feature (435)..(435): n is a, c, g, or t
  misc_feature (456)..(456): n is a, c, g, or t
  misc_feature (504)..(504): n is a, c, g, or t
  misc_feature (507)..(507): n is a, c, g, or t
  misc_feature (509)..(509): n is a, c, g, or t
  misc_feature (639)..(639): n is a, c, g, or t
  misc_feature (940)..(940): n is a, c, g, or t
  misc_feature (973)..(973): n is a, c, g, or t

SEQ ID NO: 358 - DNA, 423 bp, Artificial Sequence
  Description of Artificial Sequence: Note = Synthetic Construct
aaacgctttctttttatatccagaagaacgatatacagttagattctggaaggcagaaactacaaaatggcagttccaaaagagcctcaaaacagtgacctgattttaccggtgagacatctaggtccctaaattttgccttcgttttgattaatgaactacattgcccaaggatctacattggaaatcgcctgcgtgacagccaccataaaggtccctgactacacccaggtatggacggctacgtttcccacacagtaaaaccgtgatgcaatgcgtgatggccgcgcggatccgcaacacaggccttaaaaagggtgcgggactcgggtcggtccacacgactggaggatccctgttttcttgctcctccccgccttatttccgacgccgcagagccccaagcaacctactgtttgaagg

SEQ ID NO: 359 - DNA, 846 bp, Artificial Sequence
  Description of Artificial Sequence: Note = Synthetic Construct
  misc_feature (375)..(376): n is a, c, g, or t
aattcggcactagggcggggaagaggaaagacacagagccttcggtcctgtgggcgggccgaagtccccaccgctttctaaggcctgtgttgtgggtccgcgcggccatcacgcattgcatcgcggttttctgtggggaagaattcttgaagtcatctgcaccgtctgcctgcgaaaagatggtcaacgtgctgaaaggggtgcttatagaatgtgaccctgccatgaagcagttcttgctgtacttggatgaggccaacgccttggggaagaagttcatcattcaggacattgatgacacgcacgtcttcgtcattgccgagctggtcaacgcctccaggagcgagtaggggaactgatggaccagaatgcctnncgtcttcccacagaagtgagagcgctggtgttgagcacttgggaatcccagccacagacacttgagagaggccagctcagtgtttcgtggggtttatacttgttatgagcatgtcgtgggaaaggctgcagggtcattcattcagatgaaagcccctaactgatttggttggaccattaaaaaaaaaatatgtgtacagaagaactttagctgcaatttggctttttaagtgttatttgttattaaaatgttaatcataattctgctgctgagatggctcagttggtaaagttccttgccactaagcctgacaccctgaatataatcccaggggcctacacactggaaggggagaactctacaggctgttttctgacctgtgtgtgtgtagctccctcccacacaaatacggaaatataagaaaatgaaatcataaatgtttttcctaccttcttagaaccaattaaata

SEQ ID NO: 360 - DNA, 840 bp, Artificial Sequence
  Description of Artificial Sequence: Note = Synthetic Construct
ggctgtagtgggagtgttcgagcatccacttgggtaaacctcattctcccgtccttgttcccggtttctgacccggcgtggcatttcatggtttcttctatccgtccccttccttgtctagtcccctctcctcggccacctcttgctttggtcctcttcttagtcttctaaagaaccattgccccggagcggcccatgtgcgacctcgggtaggacgggcttggcggcgtcgagtgtggcccgggaagcccctggcgcgtctgagggactgtggggtctcggggtctggacatgtctgaacacagctggtggaggccacctcggtccgccgtcgtaggagaaggaatggagagttcgtaaaatacagtaacagaaaactgtagaggctctgtaggatccacgttcttctagaacttgggaagtagtatttaaaaatagtctaactaaaagggcttcctgcacccactttgtgatttttttttaaatcccttttcatccagcatagttttttcaaaaatcacaagtttaatgtagtagctccttgcttaaagcaattacaagttaaatttaaaaagaaaaaaaaaagatggcttatagcgctcattattgggatgcaggtgtgaaacaagtgatttgtgtggaagctggcaggatggatatgctacaagaacacgtgcccagaggatgtattgaaagttcaggtatctcagtagaatatgctaggcgctacgattaatgaacaagaggccttcgaagtagaaactgtacaaattctgaggaaatgcgagggagagtgttggatgccactgttggggatttgagaaggccaggaaacattac

SEQ ID NO: 361 - DNA, 467 bp, Artificial Sequence
  Description of Artificial Sequence: Note = Synthetic Construct
  misc_feature (6)..(6): n is a, c, g, or t
  misc_feature (16)..(16): n is a, c, g, or t
  misc_feature (26)..(26): n is a, c, g, or t
  misc_feature (29)..(29): n is a, c, g, or t
  misc_feature (34)..(36): n is a, c, g, or t
  misc_feature (43)..(43): n is a, c, g, or t
  misc_feature (74)..(74): n is a, c, g, or t
  misc_feature (83)..(83): n is a, c, g, or t
  misc_feature (90)..(90): n is a, c, g, or t
  misc_feature (95)..(95): n is a, c, g, or t
  misc_feature (104)..(104): n is a, c, g, or t
  misc_feature (125)..(125): n is a, c, g, or t
  misc_feature (134)..(134): n is a, c, g, or t
  misc_feature (167)..(167): n is a, c, g, or t
  misc_feature (174)..(174): n is a, c, g, or t
  misc_feature (176)..(176): n is a, c, g, or t
  misc_feature (186)..(186): n is a, c, g, or t
  misc_feature (189)..(189): n is a, c, g, or t
  misc_feature (193)..(193): n is a, c, g, or t
  misc_feature (272)..(272): n is a, c, g, or t
  misc_feature (279)..(279): n is a, c, g, or t
  misc_feature (306)..(306): n is a, c, g, or t
  misc_feature (350)..(350): n is a, c, g, or t
  misc_feature (356)..(356): n is a, c, g, or t
  misc_feature (360)..(360): n is a, c, g, or t
  misc_feature (386)..(386): n is a, c, g, or t
  misc_feature (424)..(424): n is a, c, g, or t
  misc_feature (444)..(444): n is a, c, g, or t
  misc_feature (452)..(452): n is a, c, g, or t
gggggnggcttttttnggaggcatanatnggggnnngtccggnaaaccccattggtcggccggggaaggaaaanggggctctnaaaatangttantgggatggngccttaagggggggcccatgngccaggaangcagattcaaaaatgttccaagtggaaaaccanggttggnanaggccctccnggncgtnaaggaggagaggagagatggagtttcaggtgtgtttcccacccagtgttcccagggaacacaaaacggataggtcaccntcaatgnacaaggaattaaaagcttgggtgtatngggaggcctgcttccaaagccaccagaaaatccggagagccggnggatcntacncacccagaggttcatagggagggcantattaggggtgtgcccttgtgagaggaagtgtggcacngtggggctgggtttgagatntcagatgntcaagccaggcccat

SEQ ID NO: 362 - DNA, 1185 bp, Artificial Sequence
  Description of Artificial Sequence: Note = Synthetic Construct
gttttaactatttttggctctttattaatcagcacataaatacgcttcgtttctccttttcaatatgtatgtgtggtgctgagtatcaaactcaaagccttgtgcgtgccatgctaacactgtaccatggagctagacttgttggcttctattaaaattctttattgtctagtctctttgacttgctttagaataaaatcctttcttagtttttctttttttttttcctgccttagtgtatataaaatacctttgttgctgtgagaaagtaccttgacaaaagcaacaaaaggaaatatgagtttattttgcttcacagttcaagagtgcagtccagagcttgaggcagctgctcacattgcatctacaatgaagaagtggacaatgatgaatgcttgtgctcagctcacattatcatttttatacagtccagggtcccagcatagggaatggtgccacccatattgggtccactcaagttgggtcttcccactttaaaaaacctattcaacataatccttaacaggcatgcccagagttcatgtcctgggtgactctagagcttatccagagttgacaactgacattaaacgtatcattctttctcttgctcaggttgaccagtaccacctcctttcccttgatctaatccactcactatctgacagcctgttctctgtacttgccaagcactttattctattgttacactgttgcaatcgcctatttcatttttcattggcatgtggttgtatttagtacccccaggttctttacatagtaactgacacagaagaactgtctgtacttcctaaataagtcggcaagtctatgagtctttagcctattcatatttcagccatcttttcatttccagctggaatcactggtaccatataaccttgttagtcaagccccacaaagtaaatagtccactctgggtatgttcaggccacttagagtctgttaccaaggaccatttgtcataatgtacaacataaagctgcctcccaactagctagtaaactggaaaaatgtaaaatctagaaaagaaaatggcttatgtgttagttatttaataaaaatccagtgagttatttaatgtattgcctgatttaaattttatgcctagtaatattttttctgcaataaatttttctttgtctttaaaaaaaaaaaaaaaaa

SEQ ID NO: 363 - DNA, 546 bp, Artificial Sequence
  Description of Artificial Sequence: Note = Synthetic Construct
  misc_feature (19)..(19): n is a, c, g, or t
  misc_feature (22)..(22): n is a, c, g, or t
  misc_feature (28)..(28): n is a, c, g, or t
  misc_feature (36)..(36): n is a, c, g, or t
  misc_feature (38)..(38): n is a, c, g, or t
  misc_feature (40)..(40): n is a, c, g, or t
  misc_feature (59)..(59): n is a, c, g, or t
  misc_feature (66)..(66): n is a, c, g, or t
  misc_feature (82)..(82): n is a, c, g, or t
  misc_feature (91)..(91): n is a, c, g, or t
  misc_feature (101)..(101): n is a, c, g, or t
  misc_feature (107)..(107): n is a, c, g, or t
  misc_feature (116)..(116): n is a, c, g, or t
  misc_feature (120)..(120): n is a, c, g, or t
  misc_feature (122)..(122): n is a, c, g, or t
  misc_feature (130)..(130): n is a, c, g, or t
  misc_feature (134)..(134): n is a, c, g, or t
  misc_feature (142)..(142): n is a, c, g, or t
  misc_feature (161)..(161): n is a, c, g, or t
  misc_feature (163)..(163): n is a, c, g, or t
  misc_feature (193)..(193): n is a, c, g, or t
  misc_feature (239)..(239): n is a, c, g, or t
  misc_feature (291)..(291): n is a, c, g, or t
  misc_feature (308)..(308): n is a, c, g, or t
  misc_feature (312)..(312): n is a, c, g, or t
  misc_feature (321)..(321): n is a, c, g, or t
  misc_feature (335)..(335): n is a, c, g, or t
  misc_feature (337)..(337): n is a, c, g, or t
  misc_feature (352)..(352): n is a, c, g, or t
  misc_feature (453)..(453): n is a, c, g, or t
  misc_feature (476)..(476): n is a, c, g, or t
  misc_feature (518)..(518): n is a, c, g, or t
ccccttccggggggtttanaanggaatnaatgggtntntnccagggggggaaacccttnaccgcgngcctttcggaattttngtccaccgnaaaaaatttnccatgngcaccatgnaagntnacgagggnattnggggttanagttttggagtgggccaanangaacatggaggaatatttgttttggtttgngaaccataccttggaaagattgtatttttatccgccaacaaccacngtggtagggtgtttttttgtttgcagcagcagataagggcagaaaaaagatntcagagatcctttgatntttnttcggggtngacgttcatgttgngnggattgggagcgganaacaatttcacacagcaaggagaggagccaatatagaggggaaaaaaaaagaaggggaaagcagttagtttaaaaagttgagagaacaaagtatgttttgnttggatgggcaaccaaagaagcntgccaggaatggtcggtaaaaggtgtaagagtcatgaaagtnttctgtccaaccgttaccggaaacatgc

SEQ ID NO: 364 - DNA, 914 bp, Artificial Sequence
  Description of Artificial Sequence: Note = Synthetic Construct
  misc_feature (20)..(20): n is a, c, g, or t
  misc_feature (22)..(22): n is a, c, g, or t
  misc_feature (26)..(26): n is a, c, g, or t
  misc_feature (31)..(31): n is a, c, g, or t
  misc_feature (40)..(40): n is a, c, g, or t
  misc_feature (46)..(46): n is a, c, g, or t
  misc_feature (49)..(50): n is a, c, g, or t
  misc_feature (57)..(57): n is a, c, g, or t
  misc_feature (59)..(59): n is a, c, g, or t
  misc_feature (61)..(61): n is a, c, g, or t
  misc_feature (68)..(69): n is a, c, g, or t
  misc_feature (71)..(72): n is a, c, g, or t
  misc_feature (85)..(85): n is a, c, g, or t
  misc_feature (94)..(94): n is a, c, g, or t
  misc_feature (101)..(102): n is a, c, g, or t
  misc_feature (105)..(105): n is a, c, g, or t
  misc_feature (117)..(117): n is a, c, g, or t
  misc_feature (119)..(120): n is a, c, g, or t
  misc_feature (126)..(126): n is a, c, g, or t
  misc_feature (131)..(131): n is a, c, g, or t
  misc_feature (136)..(136): n is a, c, g, or t
  misc_feature (138)..(139): n is a, c, g, or t
  misc_feature (142)..(142): n is a, c, g, or t
  misc_feature (149)..(151): n is a, c, g, or t
  misc_feature (165)..(165): n is a, c, g, or t
  misc_feature (172)..(172): n is a, c, g, or t
  misc_feature (181)..(181): n is a, c, g, or t
  misc_feature (189)..(189): n is a, c, g, or t
  misc_feature (196)..(196): n is a, c, g, or t
  misc_feature (205)..(205): n is a, c, g, or t
  misc_feature (209)..(209): n is a, c, g, or t
  misc_feature (213)..(213): n is a, c, g, or t
  misc_feature (226)..(227): n is a, c, g, or t
  misc_feature (230)..(231): n is a, c, g, or t
  misc_feature (239)..(239): n is a, c, g, or t
  misc_feature (254)..(255): n is a, c, g, or t
  misc_feature (258)..(258): n is a, c, g, or t
  misc_feature (262)..(262): n is a, c, g, or t
  misc_feature (264)..(264): n is a, c, g, or t
  misc_feature (275)..(275): n is a, c, g, or t
  misc_feature (283)..(283): n is a, c, g, or t
  misc_feature (287)..(287): n is a, c, g, or t
  misc_feature (290)..(290): n is a, c, g, or t
  misc_feature (293)..(293): n is a, c, g, or t
  misc_feature (298)..(298): n is a, c, g, or t
  misc_feature (303)..(303): n is a, c, g, or t
  misc_feature (308)..(308): n is a, c, g, or t
  misc_feature (311)..(311): n is a, c, g, or t
  misc_feature (319)..(319): n is a, c, g, or t
  misc_feature (321)..(321): n is a, c, g, or t
  misc_feature (324)..(324): n is a, c, g, or t
  misc_feature (327)..(327): n is a, c, g, or t
  misc_feature (329)..(329): n is a, c, g, or t
  misc_feature (337)..(337): n is a, c, g, or t
  misc_feature (341)..(342): n is a, c, g, or t
  misc_feature (344)..(345): n is a, c, g, or t
  misc_feature (348)..(348): n is a, c, g, or t
  misc_feature (350)..(350): n is a, c, g, or t
  misc_feature (352)..(352): n is a, c, g, or t
  misc_feature (356)..(360): n is a, c, g, or t
  misc_feature (362)..(362): n is a, c, g, or t
  misc_feature (370)..(370): n is a, c, g, or t
  misc_feature (374)..(374): n is a, c, g, or t
  misc_feature (381)..(381): n is a, c, g, or t
  misc_feature (383)..(383): n is a, c, g, or t
  misc_feature (389)..(390): n is a, c, g, or t
  misc_feature (404)..(404): n is a, c, g, or t
  misc_feature (408)..(408): n is a, c, g, or t
  misc_feature (412)..(413): n is a, c, g, or t
  misc_feature (423)..(423): n is a, c, g, or t
  misc_feature (434)..(436): n is a, c, g, or t
  misc_feature (440)..(440): n is a, c, g, or t
  misc_feature (442)..(443): n is a, c, g, or t
  misc_feature (446)..(446): n is a, c, g, or t
  misc_feature (454)..(454): n is a, c, g, or t
  misc_feature (471)..(471): n is a, c, g, or t
  misc_feature (477)..(477): n is a, c, g, or t
  misc_feature (490)..(490): n is a, c, g, or t
  misc_feature (492)..(492): n is a, c, g, or t
  misc_feature (503)..(503): n is a, c, g, or t
  misc_feature (509)..(509): n is a, c, g, or t
  misc_feature (514)..(514): n is a, c, g, or t
  misc_feature (516)..(516): n is a, c, g, or t
  misc_feature (530)..(530): n is a, c, g, or t
  misc_feature (557)..(557): n is a, c, g, or t
  misc_feature (559)..(559): n is a, c, g, or t
  misc_feature (561)..(561): n is a, c, g, or t
  misc_feature (570)..(570): n is a, c, g, or t
  misc_feature (572)..(572): n is a, c, g, or t
  misc_feature (576)..(576): n is a, c, g, or t
  misc_feature (626)..(626): n is a, c, g, or t
  misc_feature (635)..(635): n is a, c, g, or t
  misc_feature (639)..(639): n is a, c, g, or t
  misc_feature (653)..(653): n is a, c, g, or t
  misc_feature (661)..(661): n is a, c, g, or t
  misc_feature (669)..(669): n is a, c, g, or t
  misc_feature (680)..(681): n is a, c, g, or t
  misc_feature (685)..(685): n is a, c, g, or t
  misc_feature (690)..(690): n is a, c, g, or t
  misc_feature (692)..(694): n is a, c, g, or t
  misc_feature (697)..(697): n is a, c, g, or t
  misc_feature (703)..(703): n is a, c, g, or t
  misc_feature (709)..(709): n is a, c, g, or t
  misc_feature (713)..(713): n is a, c, g, or t
  misc_feature (722)..(722): n is a, c, g, or t
  misc_feature (730)..(730): n is a, c, g, or t
  misc_feature (756)..(756): n is a, c, g, or t
  misc_feature (758)..(758): n is a, c, g, or t
  misc_feature (762)..(762): n is a, c, g, or t
  misc_feature (772)..(772): n is a, c, g, or t
  misc_feature (779)..(779): n is a, c, g, or t
  misc_feature (793)..(793): n is a, c, g, or t
  misc_feature (800)..(800): n is a, c, g, or t
  misc_feature (825)..(825): n is a, c, g, or t
  misc_feature (834)..(834): n is a, c, g, or t
  misc_feature (837)..(837): n is a, c, g, or t
  misc_feature (840)..(840): n is a, c, g, or t
  misc_feature (861)..(861): n is a, c, g, or t
  misc_feature (863)..(863): n is a, c, g, or t
  misc_feature (870)..(870): n is a, c, g, or t
  misc_feature (879)..(879): n is a, c, g, or t
  misc_feature (882)..(882): n is a, c, g, or t
  misc_feature (886)..(886): n is a, c, g, or t
  misc_feature (901)..(901): n is a, c, g, or t
  misc_feature (909)..(910): n is a, c, g, or t
  misc_feature (912)..(912): n is a, c, g, or t
tgggattgggccctcagagncnatanacgantcagggggngtctcncanntgtctcncncntgtgtcnnannctctatccccganaattatatnacatctnngcngggtcctcctcncnncccctntgtcnctcanannttngagaccnnnctctctcacacagnatatcancacaaaatntttctctnagatatntgtgttctntgtngggngtagtgtgtgctnngcnnctcagatntgtgctttatctctnnggngtancncagacacgagnggggactncccnttngtntctcnccccnctccnctngagatgcntnttnagngntagatatnactnncnntcncncncccnnnnngngtttagancagnggtgtanangtgtcnnttgagacagagagncgcntatnnagtctccagngtgttgagatnnntatngnntcngggcatcntgttgtctcaaatctcngcgcgnaggggcgagaaananctcctgtgtgngcctcncgctntntgtaaaagagactntgctctggagatattctcatattatangngnatgggcccnanatcngaactctctctccccccgtgtgtgcatttgggagatgtgtgtcccccgcntctcccctnaatnaaaaacttttgagngtgttttnttagggcnctctaaaaaanntttntaaancnnngtngggaanaaaatntgtnggtgtgtgngcggcttngtgtgtggtgtggggtggggtataananaganaaaggggtcncctttcncgggtgtcaaaacngtgttanaaggggggccaaaccaaaaaccccncctttcggntgnttnaatttcccccccggatttttnangaattgnattttccanccnttancccccctttttttcncccccccnngngg

SEQ ID NO: 365 - DNA, 911 bp, Artificial Sequence
  Description of Artificial Sequence: Note = Synthetic Construct
  misc_feature (3)..(4): n is a, c, g, or t
  misc_feature (11)..(11): n is a, c, g, or t
  misc_feature (14)..(16): n is a, c, g, or t
  misc_feature (18)..(19): n is a, c, g, or t
  misc_feature (26)..(26): n is a, c, g, or t
  misc_feature (30)..(30): n is a, c, g, or t
  misc_feature (38)..(38): n is a, c, g, or t
  misc_feature (56)..(56): n is a, c, g, or t
  misc_feature (71)..(71): n is a, c, g, or t
  misc_feature (82)..(82): n is a, c, g, or t
  misc_feature (92)..(92): n is a, c, g, or t
  misc_feature (99)..(101): n is a, c, g, or t
  misc_feature (107)..(107): n is a, c, g, or t
  misc_feature (110)..(110): n is a, c, g, or t
  misc_feature (121)..(121): n is a, c, g, or t
  misc_feature (125)..(125): n is a, c, g, or t
  misc_feature (128)..(128): n is a, c, g, or t
  misc_feature (132)..(132): n is a, c, g, or t
  misc_feature (139)..(139): n is a, c, g, or t
  misc_feature (166)..(167): n is a, c, g, or t
  misc_feature (170)..(170): n is a, c, g, or t
  misc_feature (173)..(173): n is a, c, g, or t
  misc_feature (182)..(182): n is a, c, g, or t
  misc_feature (201)..(201): n is a, c, g, or t
  misc_feature (206)..(206): n is a, c, g, or t
  misc_feature (219)..(219): n is a, c, g, or t
  misc_feature (247)..(247): n is a, c, g, or t
  misc_feature (253)..(253): n is a, c, g, or t
  misc_feature (310)..(310): n is a, c, g, or t
  misc_feature (318)..(318): n is a, c, g, or t
  misc_feature (334)..(334): n is a, c, g, or t
  misc_feature (358)..(358): n is a, c, g, or t
  misc_feature (409)..(409): n is a, c, g, or t
  misc_feature (903)..(903): n is a, c, g, or t
ccnnttaaatnggnnncnnggggttncccnaaatttcnaagaattttgagattccngtttttggccgggtntagggtttggnggcctacctnctgttcnnnatatcnaancggtttaaacnggtnccnccgnaaccttnttttgattggcggaaggttgaaattcnntgngcnccttgtttnagggttttaaagcctaaantgatnttaaggttctccntatgtagttcattcactttgaccatctnttggcnctccatctttaaacatgtagtatactgcattcccacatttccttcggtttccgtttnaaccctcnttagcagacccggttntcagctcttggatggttccaaaanggtttccccaacctatgctcaataccacaggcagcctgcaggagggaaaantggtatgtatttaacagcatttgacccaactataagagcagagaggagctttacccagggacaggaaggcaaaagagctgaatcttaaacaaaagattaagaacaggatgtcatctgtgagcctgtcacagtgggtttgcagagcaggagaacacagacaggattagctataaagttgttacattagttattctattggagcatacaatacttaaatagttcttagggcaagagaaatgaacagaaatgaccttataagagccagagctgtagccacagctttctttgtgcttagttgctagttcactctttcccagggcagtctggtggattacaccaaattgctttagaaaatgctagctctactgtccctgtctattgtcagctttgcaatgtgcatagtgacaggagttgcctggaagcttggggcttatgttttgcagatccattgtaattaaaaaagaattgtaaggagatggaggcacggggtgagnttgaggga

SEQ ID NO: 366 - DNA, 890 bp, Artificial Sequence
  Description of Artificial Sequence: Note = Synthetic Construct
  misc_feature (4)..(4): n is a, c, g, or t
  misc_feature (11)..(13): n is a, c, g, or t
  misc_feature (23)..(23): n is a, c, g, or t
  misc_feature (31)..(31): n is a, c, g, or t
  misc_feature (50)..(50): n is a, c, g, or t
  misc_feature (76)..(76): n is a, c, g, or t
  misc_feature (80)..(80): n is a, c, g, or t
  misc_feature (88)..(88): n is a, c, g, or t
  misc_feature (94)..(94): n is a, c, g, or t
  misc_feature (98)..(98): n is a, c, g, or t
  misc_feature (111)..(111): n is a, c, g, or t
  misc_feature (133)..(133): n is a, c, g, or t
  misc_feature (144)..(144): n is a, c, g, or t
  misc_feature (149)..(149): n is a, c, g, or t
  misc_feature (165)..(165): n is a, c, g, or t
  misc_feature (173)..(173): n is a, c, g, or t
  misc_feature (188)..(188): n is a, c, g, or t
  misc_feature (202)..(202): n is a, c, g, or t
  misc_feature (237)..(237): n is a, c, g, or t
  misc_feature (269)..(269): n is a, c, g, or t
  misc_feature (280)..(280): n is a, c, g, or t
  misc_feature (283)..(283): n is a, c, g, or t
  misc_feature (285)..(285): n is a, c, g, or t
  misc_feature (290)..(290): n is a, c, g, or t
  misc_feature (297)..(297): n is a, c, g, or t
  misc_feature (302)..(302): n is a, c, g, or t
  misc_feature (307)..(307): n is a, c, g, or t
  misc_feature (319)..(319): n is a, c, g, or t
  misc_feature (367)..(367): n is a, c, g, or t
  misc_feature (383)..(383): n is a, c, g, or t
  misc_feature (396)..(396): n is a, c, g, or t
  misc_feature (520)..(520): n is a, c, g, or t
  misc_feature (889)..(889): n is a, c, g, or t
tttntattggnnncggggttccnaaattccnaaaatttgatattccgttntggccaggtttatgtttacagtcctncctnctgttcgnataccnaatngtttaaactggtnctccgaatcgttgtttgattgncgaaggttganattcntttgtgcgcttgtttnagggtttntgaggcgtaaactgnttgtttaggttctncttaatgtgttcattcatttgaccatcttttggcnctccatcttgtaaacattttagtatattgcanttccacatttnctntngcttnccgtttnacccntcttnagcagaacccgnttctcagctctgagatggtcccaaaaggtttccccaacttatgctcantaccacaggcagcctncaggagggagaantggtatgtatttaacagcatttgacccaaacttttaggagcagagaggagctttaccagggacaggaaggcaaaagagcttgatcttaaacaaaggattaggaacaggatgtcatctgtgagcntgtcacagtgggtttgcagagcaggagaacacagacaggattagctataaagttgttacattagttattctattggagcatacaatacttaaatagttctagggcaagagaaatgaacagaaatgaccttataagagccagagctgtagccacagctttctttgtgcttagtttgctgttcactctttccagggcagtctggtggattacaccaaattgctttagaaaatgctagctctactgtccctgtctattgtcagctttgcaatgtgcatagtgacaggagttgcctgggaacttggggcttatgttttgcagatccattgtaattaaaaaagaattgtaaggagatggaggcacggggcatgnt

SEQ ID NO: 367 - DNA, 97 bp, Artificial Sequence; identical to SEQ ID NO: 147
  Description of Artificial Sequence: Note = Synthetic Construct

SEQ ID NO: 368 - DNA, 309 bp, Artificial Sequence
  Description of Artificial Sequence: Note = Synthetic Construct
ccgcctagtcatcacgggagcatcggcggggcccggagccactgaggaagggcagggaaccatgtcaacccgaccctcgggacggctgccctgagacaccctgagagaatgttggctcaattaagaaacatcagggagataaattcaactcagtgcatttaaaaatgactacaaaacgaagtttgtttgtgcggttggtaccatgtcgctttctacgaggagaagaggagacagtcactactttagattattctcattgcagcttggaacaagttcccaaagagattttcacctttgaaaaaactttag

SEQ ID NO: 369 - DNA, 959 bp, Artificial Sequence
  Description of Artificial Sequence: Note = Synthetic Construct
  misc_feature (17)..(17): n is a, c, g, or t
  misc_feature (19)..(20): n is a, c, g, or t
  misc_feature (34)..(34): n is a, c, g, or t
  misc_feature (231)..(231): n is a, c, g, or t
  misc_feature (257)..(257): n is a, c, g, or t
  misc_feature (259)..(259): n is a, c, g, or t
  misc_feature (280)..(280): n is a, c, g, or t
  misc_feature (360)..(360): n is a, c, g, or t
  misc_feature (362)..(362): n is a, c, g, or t
  misc_feature (442)..(442): n is a, c, g, or t
  misc_feature (444)..(444): n is a, c, g, or t
  misc_feature (448)..(448): n is a, c, g, or t
  misc_feature (467)..(467): n is a, c, g, or t
  misc_feature (507)..(507): n is a, c, g, or t
  misc_feature (546)..(546): n is a, c, g, or t
  misc_feature (560)..(560): n is a, c, g, or t
  misc_feature (582)..(582): n is a, c, g, or t
  misc_feature (605)..(605): n is a, c, g, or t
  misc_feature (609)..(609): n is a, c, g, or t
  misc_feature (640)..(640): n is a, c, g, or t
  misc_feature (642)..(642): n is a, c, g, or t
  misc_feature (655)..(657): n is a, c, g, or t
  misc_feature (697)..(697): n is a, c, g, or t
  misc_feature (703)..(703): n is a, c, g, or t
  misc_feature (711)..(711): n is a, c, g, or t
  misc_feature (720)..(720): n is a, c, g, or t
  misc_feature (728)..(728): n is a, c, g, or t
  misc_feature (735)..(735): n is a, c, g, or t
  misc_feature (743)..(743): n is a, c, g, or t
  misc_feature (754)..(754): n is a, c, g, or t
  misc_feature (758)..(758): n is a, c, g, or t
  misc_feature (762)..(762): n is a, c, g, or t
  misc_feature (773)..(773): n is a, c, g, or t
  misc_feature (779)..(779): n is a, c, g, or t
  misc_feature (781)..(781): n is a, c, g, or t
  misc_feature (783)..(783): n is a, c, g, or t
  misc_feature (788)..(788): n is a, c, g, or t
  misc_feature (795)..(795): n is a, c, g, or t
  misc_feature (801)..(801): n is a, c, g, or t
  misc_feature (821)..(821): n is a, c, g, or t
  misc_feature (837)..(837): n is a, c, g, or t
  misc_feature (842)..(842): n is a, c, g, or t
  misc_feature (851)..(851): n is a, c, g, or t
  misc_feature (853)..(853): n is a, c, g, or t
  misc_feature (862)..(862): n is a, c, g, or t
  misc_feature (870)..(870): n is a, c, g, or t
  misc_feature (873)..(873): n is a, c, g, or t
  misc_feature (876)..(876): n is a, c, g, or t
  misc_feature (881)..(881): n is a, c, g, or t
  misc_feature (906)..(906): n is a, c, g, or t
  misc_feature (911)..(911): n is a, c, g, or t
  misc_feature (920)..(920): n is a, c, g, or t
  misc_feature (930)..(931): n is a, c, g, or t
  misc_feature (940)..(940): n is a, c, g, or t
cattcaacagattctantnnccgatccaacccgnatgaaacccactcctttcagacttagactcttaggacagaaaagacccttaaaggtcatttgctccccgcttcccctccccacaagtaaggtccaggaagaaaggatttgtgttcgaaggtaagttatggcgtggaaaggacagaatgcggcttgataaccccacggcacctttctgccctatcccacgcagcctanggccgtttcgtcctggaagcattacnangagataataaatgcaatgaangtatttacaaactgtaaacccagtgaatccgctatccaaccctgaggcgacggaggtagaaatggaggacttgacaagananagtggatctgggtgggctaagcacctaccgcacaatcctattttttgttgaggaatccgcatctggccccatgatgacanangaangagtgtgcccttctcaganaaagctgttgaagattcctttcttctttgagacaaggtcncactagttattccctggctgtcctgaaactcactatgtncacaagctggacangaacctcacagtctctgcctgnttttgccttccaacactgggatnaaangcctttttttttttaaagataaattagtcanancaagtgtatggcnnnccctttatccaagacttgataacacccagagtttaggaancctgtntaacaganagtcaaganacaaggtnaacagantaaaaatnaaaataattanaatntagnaataataaaanaggcantnanaccantaaagcngaaacnggcaagaaatttcatccaanttcaataaaattattnaaagnccaagacangnatgtttcanccgatganttnaanaaatntggccaaaaggcctatttggcaacngatcnctaaaagtntcccaaaaanngcctccttntaaacccaataccaaattg

SEQ ID NO: 370 - DNA, 916 bp, Artificial Sequence
  Description of Artificial Sequence: Note = Synthetic Construct
  misc_feature (17)..(17): n is a, c, g, or t
  misc_feature (27)..(27): n is a, c, g, or t
  misc_feature (173)..(173): n is a, c, g, or t
  misc_feature (200)..(200): n is a, c, g, or t
  misc_feature (210)..(210): n is a, c, g, or t
  misc_feature (312)..(312): n is a, c, g, or t
  misc_feature (356)..(356): n is a, c, g, or t
  misc_feature (532)..(532): n is a, c, g, or t
  misc_feature (548)..(548): n is a, c, g, or t
  misc_feature (634)..(634): n is a, c, g, or t
  misc_feature (703)..(703): n is a, c, g, or t
  misc_feature (741)..(741): n is a, c, g, or t
  misc_feature (755)..(755): n is a, c, g, or t
  misc_feature (757)..(757): n is a, c, g, or t
  misc_feature (787)..(787): n is a, c, g, or t
  misc_feature (805)..(805): n is a, c, g, or t
  misc_feature (820)..(820): n is a, c, g, or t
  misc_feature (842)..(842): n is a, c, g, or t
  misc_feature (883)..(883): n is a, c, g, or t
  misc_feature (893)..(893): n is a, c, g, or t
  misc_feature (898)..(898): n is a, c, g, or t
  misc_feature (910)..(910): n is a, c, g, or t
  misc_feature (913)..(914): n is a, c, g, or t
cattccctgatcagtangttccaatangatcgcatgtaataagcttgttattcaagatagagcaacgttttaacgaactgaaacactgtttctctgtgaattctactactaagccatatatacacagcttcccttcaaaacaaaacgaaacaaaacaggattgctgggcatantggcctataccttttacccagtactangcaggcagangcaggcagatctgagttcagggccagccaggaatacatagaccttgtctcaaaaacaaacacaaaattaagtttaattttaaaaagactgtatgtgtatganggtagttgtttgttttgcctacatatatggctgtacatcatgtncatatgcagtaacctaattggccagaagaaggcataatatgcaacctctagaactggagttagagacagttgttagcaatactaagtgaagggagctatgcccaagtcctctgcaagaacaacaagtgcttttacctgctgaacttctctccagacccagtattaaatattacatncaccaagctggtatcnaatccccatatagtaaaaaataacctgaatcctgatcctctgcctctactccaaatcagggaaatatagcatgtttgcctgcccanttatgcctgccagatcaagccaaacccctactggtagcaaccccctgccactgaatgaatctgataacnctacacttatgcctcctaacccctggggcgttttcacnctttaaaaaccgcntntcctaactctccaaatttctccaacttcanttacaaaggcaaccaagnactttttactggacnaaggccactccccaaaaatttnatcaaaatctcccctcctttcccaaaaaggaatatcccaanccccccctgnccctnaaaaatggaatnccnntc

SEQ ID NO: 371 - DNA, 905 bp, Artificial Sequence
  Description of Artificial Sequence: Note = Synthetic Construct
  misc_feature (24)..(24): n is a, c, g, or t
  misc_feature (290)..(290): n is a, c, g, or t
  misc_feature (320)..(320): n is a, c, g, or t
  misc_feature (433)..(433): n is a, c, g, or t
  misc_feature (450)..(450): n is a, c, g, or t
  misc_feature (477)..(477): n is a, c, g, or t
  misc_feature (481)..(481): n is a, c, g, or t
  misc_feature (487)..(487): n is a, c, g, or t
  misc_feature (518)..(518): n is a, c, g, or t
  misc_feature (524)..(524): n is a, c, g, or t
  misc_feature (555)..(555): n is a, c, g, or t
  misc_feature (580)..(580): n is a, c, g, or t
  misc_feature (637)..(637): n is a, c, g, or t
  misc_feature (654)..(654): n is a, c, g, or t
  misc_feature (662)..(662): n is a, c, g, or t
  misc_feature (666)..(666): n is a, c, g, or t
  misc_feature (677)..(677): n is a, c, g, or t
  misc_feature (705)..(705): n is a, c, g, or t
  misc_feature (708)..(708): n is a, c, g, or t
  misc_feature (713)..(713): n is a, c, g, or t
  misc_feature (724)..(724): n is a, c, g, or t
  misc_feature (735)..(735): n is a, c, g, or t
  misc_feature (741)..(741): n is a, c, g, or t
  misc_feature (745)..(745): n is a, c, g, or t
  misc_feature (766)..(766): n is a, c, g, or t
  misc_feature (786)..(786): n is a, c, g, or t
  misc_feature (792)..(793): n is a, c, g, or t
  misc_feature (802)..(802): n is a, c, g, or t
  misc_feature (813)..(813): n is a, c, g, or t
  misc_feature (822)..(822): n is a, c, g, or t
  misc_feature (825)..(825): n is a, c, g, or t
  misc_feature (854)..(854): n is a, c, g, or t
  misc_feature (861)..(861): n is a, c, g, or t
  misc_feature (864)..(864): n is a, c, g, or t
  misc_feature (876)..(876): n is a, c, g, or t
  misc_feature (884)..(884): n is a, c, g, or t
  misc_feature (897)..(897): n is a, c, g, or t
  misc_feature (899)..(899): n is a, c, g, or t
cattcctcttatctttggagcgcngtatgaaaaagattgcacgtagccccggataacctgctaagtgtgactattcacctagcagtgagctcagtgcagaaacaatattctaagggcatgaattacaagttgaaaatcttaattgtttatattcaattatcataaatcatcatttgttctgggaaaacactattacttcccagattcaaaaatactttagtttgtcaaatgtagttttcaaagggttatttagacaaaacgtatttaaatcttaagaatgtgcaagttcngattagaccattaacaatttattataagtntgacctcaagctgggagagatgactcagtggttaagaacaccaactgctcctcccaaagtcctgaatgcaaatcccagcaaccacatggtggctcacaaccatctgttatganatctgatgccctcttcnggtgtgtctgaagacagctacggtgtnctcntatatnataaataaatgaaatatttattaaaaatgcntgaccncccatgaaaaaattgttttttggaaatgaanaaaaatctgatatttaaactatgcngaaatgcctaatataataaacttttccatccccaccattccaaataataatgtttanaaaaaaattatgttganctgaatcnttanaaagaataatntctacctaatccaatgaatatgtaccantcntctanctactatctantagttccagantacaanctcnctcctactttccttaagaacncctaaaactaaactgatctncaaaannctcctgttnacaatatttanaatactgantanctgtcctaacaaaaatctcctttcctaanaatttanaanaatttaaaatanaggccccnttaatgaaacatntnttcctt

SEQ ID NO: 372 - DNA, 553 bp, Artificial Sequence
  Description of Artificial Sequence: Note = Synthetic Construct
  misc_feature (2)..(3): n is a, c, g, or t
  misc_feature (6)..(8): n is a, c, g, or t
  misc_feature (446)..(446): n is a, c, g, or t
  misc_feature (483)..(483): n is a, c, g, or t
  misc_feature (544)..(544): n is a, c, g, or t
  misc_feature (550)..(550): n is a, c, g, or t
tnncannncacacagaattcatttgatggttaatgatggaaaatcccaggatttaaaaggagcaagggggcggggaggggggctgactggttttccaaagagatgcaaaattcttcatctctgtaatttaaggtcttgaaccctactgtgggggcagggagagaagtagaagccttgaatgcagggaggtaatgtcacatctccgagcccttggtgccagcccgcattgtttaagcaaagaaatctgatgacgaatagtcaatttcccttccccccaccttagctcgtctcaggctttcccgtactctgcactttgcagacctggacaagaaccgcggttcctggccagccgggcagcagagatgagtccaggcactggaatgtggcaggtgggagggactcccaggttgttctcttgtacttccccttttggaaatccagatggncactggcgtctttcttcaaccgagattcctcaaccanctctccaatcaatcaatgctctctcttccctcttttggttcttaccccctcaaaagcctgnagtttnttt

SEQ ID NO: 373 - DNA, 562 bp, Artificial Sequence
  Description of Artificial Sequence: Note = Synthetic Construct
  misc_feature (4)..(4): n is a, c, g, or t
  misc_feature (10)..(10): n is a, c, g, or t
  misc_feature (28)..(28): n is a, c, g, or t
  misc_feature (34)..(34): n is a, c, g, or t
  misc_feature (68)..(68): n is a, c, g, or t
  misc_feature (83)..(83): n is a, c, g, or t
  misc_feature (93)..(93): n is a, c, g, or t
  misc_feature (119)..(119): n is a, c, g, or t
  misc_feature (136)..(136): n is a, c, g, or t
  misc_feature (139)..(139): n is a, c, g, or t
  misc_feature (160)..(161): n is a, c, g, or t
  misc_feature (170)..(170): n is a, c, g, or t
  misc_feature (242)..(242): n is a, c, g, or t
  misc_feature (258)..(258): n is a, c, g, or t
  misc_feature (292)..(292): n is a, c, g, or t
  misc_feature (304)..(304): n is a, c, g, or t
  misc_feature (350)..(350): n is a, c, g, or t
  misc_feature (358)..(358): n is a, c, g, or t
  misc_feature (373)..(373): n is a, c, g, or t
  misc_feature (396)..(396): n is a, c, g, or t
  misc_feature (403)..(403): n is a, c, g, or t
  misc_feature (426)..(426): n is a, c, g, or t
  misc_feature (430)..(430): n is a, c, g, or t
  misc_feature (433)..(433): n is a, c, g, or t
  misc_feature (449)..(450): n is a, c, g, or t
  misc_feature (454)..(454): n is a, c, g, or t
  misc_feature (456)..(456): n is a, c, g, or t
  misc_feature (469)..(469): n is a, c, g, or t
  misc_feature (472)..(473): n is a, c, g, or t
  misc_feature (487)..(488): n is a, c, g, or t
  misc_feature (496)..(496): n is a, c, g, or t
  misc_feature (523)..(523): n is a, c, g, or t
  misc_feature (530)..(530): n is a, c, g, or t
  misc_feature (532)..(532): n is a, c, g, or t
  misc_feature (535)..(536): n is a, c, g, or t
  misc_feature (547)..(547): n is a, c, g, or t
ccanttcacncagaattctaggaggagnaagggncattctcacacaggggcatcgagctccagtgtgngctactgctctgtgnaggacactgnatttcatcagtcatcgcagtagctgnttccagctgtcatcaanggnattgactacttctatggttgnnatctattgngtgtgtgtgtgtgtgtgtgtatatatatatatatatatatatatatatatgtatatatacatatatatgtgngtgtgtatgtatatgnatatgtatatatcatgacatgtatattactaggntcccccctgatngtgaatgggaatcaccaggatcatcttgactaaggcagaaaacaanctacatgnagagacaagcacgtnaaaataatccgtatacccccaancgggagngcattcggcatcttggaactatntggncgnatcttcctactggcannagananacattgaaccatnggnnattaagagctgctnncacctatnttcaactccgagcatctacaggtgggncaacccnanccnnctggctatgtncccccccccagggcc

SEQ ID NO: 374 - DNA, 936 bp, Artificial Sequence
  Description of Artificial Sequence: Note = Synthetic Construct
  misc_feature (10)..(10): n is a, c, g, or t
  misc_feature (24)..(24): n is a, c, g, or t
  misc_feature (29)..(29): n is a, c, g, or t
  misc_feature (52)..(52): n is a, c, g, or t
  misc_feature (105)..(105): n is a, c, g, or t
  misc_feature (570)..(570): n is a, c, g, or t
  misc_feature (622)..(622): n is a, c, g, or t
  misc_feature (626)..(626): n is a, c, g, or t
  misc_feature (653)..(653): n is a, c, g, or t
  misc_feature (682)..(682): n is a, c, g, or t
  misc_feature (746)..(746): n is a, c, g, or t
  misc_feature (749)..(749): n is a, c, g, or t
  misc_feature (756)..(756): n is a, c, g, or t
  misc_feature (760)..(760): n is a, c, g, or t
  misc_feature (778)..(778): n is a, c, g, or t
  misc_feature (780)..(780): n is a, c, g, or t
  misc_feature (784)..(784): n is a, c, g, or t
  misc_feature (793)..(793): n is a, c, g, or t
  misc_feature (797)..(797): n is a, c, g, or t
  misc_feature (808)..(808): n is a, c, g, or t
  misc_feature (811)..(811): n is a, c, g, or t
  misc_feature (816)..(816): n is a, c, g, or t
  misc_feature (823)..(823): n is a, c, g, or t
  misc_feature (831)..(831): n is a, c, g, or t
  misc_feature (844)..(844): n is a, c, g, or t
  misc_feature (854)..(854): n is a, c, g, or t
  misc_feature (856)..(856): n is a, c, g, or t
  misc_feature (864)..(864): n is a, c, g, or t
  misc_feature (871)..(871): n is a, c, g, or t
  misc_feature (876)..(876): n is a, c, g, or t
  misc_feature (884)..(884): n is a, c, g, or t
  misc_feature (902)..(902): n is a, c, g, or t
  misc_feature (913)..(913): n is a, c, g, or t
caattcaatntcaatcagtatgtngctcntttggataacatgtaataagcgncttattcaagaaaagagcaacgttttaacgaactgaaacactgtttctcttgnaagtcagttagttcccagtagcctgctcttgtacgatgtgtacttttaaagatttatcaaaatttggtgagccgaatctgagtaacatgggtgaattcaaagccatcctgggctagatacatgatgagttctagggtagtacaggctatgaaagcctgtccccaaaggaaaaataagattattttttaaaatatcacaaagagtttttaaatgtaatcatatacatataaatgtatagtaaaactttttgggaaatagtccgataaaaaatatttcaggtttacaggtcatatggtctattgtcactgggaagcactcattgttgtatgtcaataaaactttatgttaaaaatttgcttggaagtgcatctggcccatgaccaactttacagacagctggtatccggaaatccataatactggaattaccagtgtggtgacacacccagtggtcctagcactganaaaagtcacccacagttactcctgagtttgaatagcacctgggttatatganaccntaaaaaaccatattaaaataccaaacncccaggcaaggcatatcccaggacaaaanaattgcctccctgaacaaaggctcttgtaacagggccttcccataactcccttccccaaatacnaanttaaatncccnctgggtttataccccggncnggcncccaaattncccncccaaaaaaancanctaangggcttnggcctacntcccccaaaaccncttgatgccnancccccccnggtgcanggagngccccccnccccgaaaaaaggaaaanaaccccgtttnggggttccattggccggggccgg

SEQ ID NO: 375 - DNA, 56 bp, Artificial Sequence
  Description of Artificial Sequence: Note = Synthetic Construct
  misc_feature (26)..(26): n is a, c, g, or t
  misc_feature (29)..(29): n is a, c, g, or t
  misc_feature (41)..(41): n is a, c, g, or t
caattcactctcaatcagacagcagntcnttgttacataangggcctggtcgtctg

SEQ ID NO: 376 - DNA, 148 bp, Artificial Sequence
  Description of Artificial Sequence: Note = Synthetic Construct
  misc_feature (19)..(19): n is a, c, g, or t
  misc_feature (56)..(56): n is a, c, g, or t
caattcgcctcttattctnaagcttgctcctttgaggataaagatggattgtgtcnagcgacaacctgctgaggtgctcacctagtgttctctctctctctctctctctctctctctctctctctctctctctctctctctctctcct

SEQ ID NO: 377 - DNA, 870 bp, Artificial Sequence
  Description of Artificial Sequence:/note = synthetic construct
  misc_feature (19)..(19): n is a, c, g, or t
  misc_feature (23)..(23): n is a, c, g, or t
  misc_feature (27)..(27): n is a, c, g, or t
  misc_feature (30)..(30): n is a, c, g, or t
  misc_feature (34)..(34): n is a, c, g, or t
  misc_feature (53)..(53): n is a, c, g, or t
  misc_feature (56)..(56): n is a, c, g, or t
  misc_feature (60)..(60): n is a, c, g, or t
  misc_feature (72)..(72): n is a, c, g, or t
  misc_feature (76)..(77): n is a, c, g, or t
  misc_feature (86)..(87): n is a, c, g, or t
  misc_feature (90)..(90): n is a, c, g, or t
  misc_feature (101)..(101): n is a, c, g, or t
  misc_feature (104)..(104): n is a, c, g, or t
  misc_feature (107)..(107): n is a, c, g, or t
  misc_feature (114)..(114): n is a, c, g, or t
  misc_feature (119)..(120): n is a, c, g, or t
  misc_feature (122)..(123): n is a, c, g, or t
  misc_feature (145)..(145): n is a, c, g, or t
  misc_feature (155)..(155): n is a, c, g, or t
  misc_feature (172)..(172): n is a, c, g, or t
  misc_feature (174)..(174): n is a, c, g, or t
  misc_feature (176)..(176): n is a, c, g, or t
  misc_feature (184)..(184): n is a, c, g, or t
  misc_feature (187)..(188): n is a, c, g, or t
  misc_feature (201)..(201): n is a, c, g, or t
  misc_feature (205)..(206): n is a, c, g, or t
  misc_feature (208)..(208): n is a, c, g, or t
  misc_feature (214)..(214): n is a, c, g, or t
  misc_feature (220)..(220): n is a, c, g, or t
  misc_feature (226)..(226): n is a, c, g, or t
  misc_feature (238)..(238): n is a, c, g, or t
  misc_feature (241)..(241): n is a, c, g, or t
  misc_feature (243)..(243): n is a, c, g, or t
  misc_feature (246)..(246): n is a, c, g, or t
  misc_feature (261)..(261): n is a, c, g, or t
  misc_feature (290)..(290): n is a, c, g, or t
  misc_feature (311)..(311): n is a, c, g, or t
  misc_feature (342)..(342): n is a, c, g, or t
  misc_feature (365)..(365): n is a, c, g, or t
  misc_feature (374)..(374): n is a, c, g, or t
  misc_feature (381)..(381): n is a, c, g, or t
  misc_feature (385)..(385): n is a, c, g, or t
  misc_feature (421)..(421): n is a, c, g, or t
  misc_feature (427)..(427): n is a, c, g, or t
  misc_feature (441)..(441): n is a, c, g, or t
  misc_feature (460)..(460): n is a, c, g, or t
  misc_feature (463)..(463): n is a, c, g, or t
  misc_feature (465)..(465): n is a, c, g, or t
  misc_feature (467)..(467): n is a, c, g, or t
  misc_feature (471)..(471): n is a, c, g, or t
  misc_feature (478)..(478): n is a, c, g, or t
  misc_feature (489)..(489): n is a, c, g, or t
  misc_feature (494)..(494): n is a, c, g, or t
  misc_feature (502)..(502): n is a, c, g, or t
  misc_feature (514)..(514): n is a, c, g, or t
  misc_feature (520)..(521): n is a, c, g, or t
  misc_feature (535)..(535): n is a, c, g, or t
  misc_feature (542)..(542): n is a, c, g, or t
  misc_feature (544)..(544): n is a, c, g, or t
  misc_feature (548)..(548): n is a, c, g, or t
  misc_feature (553)..(554): n is a, c, g, or t
  misc_feature (566)..(566): n is a, c, g, or t
  misc_feature (575)..(575): n is a, c, g, or t
  misc_feature (580)..(580): n is a, c, g, or t
  misc_feature (585)..(585): n is a, c, g, or t
  misc_feature (590)..(590): n is a, c, g, or t
  misc_feature (593)..(593): n is a, c, g, or t
  misc_feature (595)..(595): n is a, c, g, or t
  misc_feature (599)..(599): n is a, c, g, or t
  misc_feature (603)..(603): n is a, c, g, or t
  misc_feature (605)..(607): n is a, c, g, or t
  misc_feature (640)..(640): n is a, c, g, or t
  misc_feature (666)..(666): n is a, c, g, or t
  misc_feature (668)..(668): n is a, c, g, or t
  misc_feature (681)..(681): n is a, c, g, or t
  misc_feature (691)..(692): n is a, c, g, or t
  misc_feature (696)..(696): n is a, c, g, or t
  misc_feature (699)..(699): n is a, c, g, or t
  misc_feature (702)..(702): n is a, c, g, or t
  misc_feature (717)..(717): n is a, c, g, or t
  misc_feature (721)..(721): n is a, c, g, or t
  misc_feature (729)..(729): n is a, c, g, or t
  misc_feature (737)..(737): n is a, c, g, or t
  misc_feature (754)..(754): n is a, c, g, or t
  misc_feature (761)..(762): n is a, c, g, or t
  misc_feature (765)..(765): n is a, c, g, or t
  misc_feature (768)..(768): n is a, c, g, or t
  misc_feature (787)..(787): n is a, c, g, or t
  misc_feature (803)..(803): n is a, c, g, or t
  misc_feature (818)..(819): n is a, c, g, or t
  misc_feature (821)..(821): n is a, c, g, or t
  misc_feature (832)..(832): n is a, c, g, or t
  misc_feature (836)..(837): n is a, c, g, or t
  misc_feature (839)..(839): n is a, c, g, or t
  misc_feature (844)..(844): n is a, c, g, or t
  misc_feature (847)..(847): n is a, c, g, or t
  misc_feature (852)..(852): n is a, c, g, or t
  misc_feature (855)..(855): n is a, c, g, or t
  misc_feature (864)..(864): n is a, c, g, or t
attcattcctccttcttcngtcnagcntcntttnggtataaccaatataccgnggnccangctccatcaaancagnngaggacaanngcncaggcaggttnttnacnaggctantttcnnannctccagatttcattcccctccngatccatacncctgctgttgcaaaatngntnacctcccntgnncccccgggtccgnctcnnanacgatnttcccncctcanacgacctctaanctncntgnggtctccagtccctngatgattgggtgaatcttctctgactcancctcaccggggagtcctccgnggttcatgtgtggggggccccctctcagctngtgatatgccggccgtctggttntcccctgtntttttanacgngggggtcccagggttaatatgatgacgccgggtcanccaacncggggggccctccntctcagcagcttctagctntcncnanttcnccccggnggacaaaatcntctgnccatgggngtggggtccatntctgcnnctgagctatcactnttcatgngntctnttggnnggcactccgccnagtcctttntgtcngtgcnggttnggngnagtnatgngnnnggttcggggcctccccttgggccggatgctctngagggctgataagggatttctttcgncngggctctccttcncctatctttnntccnagnagnaaaagtgtggttcancttnacctgggntcaggacnttgttcctgaccccgtntttggcnnggnggngaataattcccccccccgnggcttctctgggctcnccctcctttatcctnntntcctgggtttncccnncnctctnttnccccnggnttttttgtnccccgg

SEQ ID NO: 378 - DNA, 904 bp, Artificial Sequence
  Description of Artificial Sequence:/note = synthetic construct
  misc_feature (22)..(22): n is a, c, g, or t
  misc_feature (108)..(108): n is a, c, g, or t
  misc_feature (133)..(133): n is a, c, g, or t
  misc_feature (207)..(207): n is a, c, g, or t
  misc_feature (265)..(265): n is a, c, g, or t
  misc_feature (271)..(271): n is a, c, g, or t
  misc_feature (278)..(278): n is a, c, g, or t
  misc_feature (305)..(305): n is a, c, g, or t
  misc_feature (352)..(352): n is a, c, g, or t
  misc_feature (375)..(375): n is a, c, g, or t
  misc_feature (396)..(396): n is a, c, g, or t
  misc_feature (413)..(413): n is a, c, g, or t
  misc_feature (415)..(415): n is a, c, g, or t
  misc_feature (421)..(421): n is a, c, g, or t
  misc_feature (456)..(456): n is a, c, g, or t
  misc_feature (458)..(458): n is a, c, g, or t
  misc_feature (462)..(462): n is a, c, g, or t
  misc_feature (464)..(464): n is a, c, g, or t
  misc_feature (485)..(485): n is a, c, g, or t
  misc_feature (487)..(487): n is a, c, g, or t
  misc_feature (546)..(546): n is a, c, g, or t
  misc_feature (575)..(575): n is a, c, g, or t
  misc_feature (597)..(597): n is a, c, g, or t
  misc_feature (602)..(602): n is a, c, g, or t
  misc_feature (640)..(640): n is a, c, g, or t
  misc_feature (643)..(643): n is a, c, g, or t
  misc_feature (648)..(648): n is a, c, g, or t
  misc_feature (655)..(655): n is a, c, g, or t
  misc_feature (667)..(667): n is a, c, g, or t
  misc_feature (688)..(688): n is a, c, g, or t
  misc_feature (692)..(692): n is a, c, g, or t
  misc_feature (732)..(732): n is a, c, g, or t
  misc_feature (748)..(749): n is a, c, g, or t
  misc_feature (752)..(752): n is a, c, g, or t
  misc_feature (754)..(755): n is a, c, g, or t
  misc_feature (761)..(761): n is a, c, g, or t
  misc_feature (767)..(768): n is a, c, g, or t
  misc_feature (770)..(773): n is a, c, g, or t
  misc_feature (775)..(775): n is a, c, g, or t
  misc_feature (777)..(777): n is a, c, g, or t
  misc_feature (791)..(794): n is a, c, g, or t
  misc_feature (800)..(800): n is a, c, g, or t
  misc_feature (806)..(806): n is a, c, g, or t
  misc_feature (815)..(815): n is a, c, g, or t
  misc_feature (830)..(830): n is a, c, g, or t
  misc_feature (837)..(837): n is a, c, g, or t
  misc_feature (845)..(845): n is a, c, g, or t
  misc_feature (852)..(852): n is a, c, g, or t
  misc_feature (862)..(862): n is a, c, g, or t
  misc_feature (886)..(886): n is a, c, g, or t
  misc_feature (891)..(891): n is a, c, g, or t
  misc_feature (899)..(899): n is a, c, g, or t
  misc_feature (901)..(901): n is a, c, g, or t
cattccattgaatcacatgatncttatattccgttccttaaatgttgttacatattgaaaagcacactcatacaagcatttacattgggaactcactgaattccctanactcaaatccccgcctgtaatttangtgactcaagttttcgtcttttcagaactaaaattctaaaaaattccaggcccaaagcctccatcaagtgtgtntctaaagggaacggtttgcactcagtaacatccattctttaaggctttttacagacanaaaaanaaaagtnggcagctttgcaagggtcagttgaaanctgcataaacaaaccccgggcttggtagcatacagctttaatcccantattggataaagaactgaattcnaaggcacctggtccacaaatnggttctaagataccaangntaccanataaacctgtctccaggaaaaataaataaccaatnancgancnattttaactgggcatggttananccccccccatataagggggcccctccccttaattttaagaataaatatcctgttattcntgttattactgaacatatctcctaaagcnccctattgcaggtctggaactnaattngggatcgggccgccaccatctggtaatgctactctgantcngtttncccgaanctgttccataancccggctctctaaaaaaagtnttcnccagtttcggatcaccaaaacctccctgaaaatccaattnataacttaacaccaannttngnnccttanttttcnntnnnncncnggctattattgccnnnntcttanggaaanaaaaagggnaacccgggacccctnccccatnttcccctnattagtngggggggggncccccaaacttggaattttaaggnaagtnacgccccncnccc

SEQ ID NO: 379 - DNA, 488 bp, Artificial Sequence
  Description of Artificial Sequence: note = synthetic construct
  misc_feature (33)..(33): n is a, c, g, or t
  misc_feature (38)..(38): n is a, c, g, or t
  misc_feature (74)..(74): n is a, c, g, or t
  misc_feature (104)..(104): n is a, c, g, or t
  misc_feature (199)..(199): n is a, c, g, or t
  misc_feature (223)..(223): n is a, c, g, or t
  misc_feature (226)..(226): n is a, c, g, or t
  misc_feature (240)..(240): n is a, c, g, or t
  misc_feature (322)..(322): n is a, c, g, or t
  misc_feature (325)..(325): n is a, c, g, or t
  misc_feature (422)..(422): n is a, c, g, or t
  misc_feature (439)..(439): n is a, c, g, or t
  misc_feature (460)..(460): n is a, c, g, or t
caattcattagaaatctatgagcctggtcactngcctncgtcgtccacgtcgttgttgggattgctgtttttantagctgcaaacggttcgtttctgctatctntgttttgataaatcagccccgggcagatgatattcgaaagttccctttaagagcttatttttacgggctcaatgccaccggtttcgttcttctangcacgttctgcgcatttttgtttnttngtatttttggatcncgtttcgtgggatcttaaaaaccgttttctgtgattggcacgcaagaaatactcatgaactggtccctgttgtgtctctcangancaatcaaatacccatttccaacggctttctaatgtctggttctgtttgcacaggaaacgaaatcaccgcttgcacccgtgaatctggggaagttcanaactgggaactgcccanaagaagggttcggggctacanccatcaatctccatttgttttgaaagac

SEQ ID NO: 380 - DNA, 909 bp, Artificial Sequence
  Description of Artificial Sequence: Note = Synthetic Construct
  misc_feature (49)..(49): n is a, c, g, or t
  misc_feature (192)..(192): n is a, c, g, or t
  misc_feature (201)..(201): n is a, c, g, or t
  misc_feature (237)..(238): n is a, c, g, or t
  misc_feature (243)..(243): n is a, c, g, or t
  misc_feature (247)..(247): n is a, c, g, or t
  misc_feature (275)..(275): n is a, c, g, or t
  misc_feature (285)..(285): n is a, c, g, or t
  misc_feature (297)..(297): n is a, c, g, or t
  misc_feature (305)..(306): n is a, c, g, or t
  misc_feature (309)..(309): n is a, c, g, or t
  misc_feature (312)..(313): n is a, c, g, or t
  misc_feature (319)..(319): n is a, c, g, or t
  misc_feature (330)..(331): n is a, c, g, or t
  misc_feature (338)..(338): n is a, c, g, or t
  misc_feature (352)..(352): n is a, c, g, or t
  misc_feature (364)..(364): n is a, c, g, or t
  misc_feature (367)..(367): n is a, c, g, or t
  misc_feature (374)..(374): n is a, c, g, or t
  misc_feature (397)..(397): n is a, c, g, or t
  misc_feature (418)..(418): n is a, c, g, or t
  misc_feature (425)..(425): n is a, c, g, or t
  misc_feature (437)..(438): n is a, c, g, or t
  misc_feature (446)..(446): n is a, c, g, or t
  misc_feature (453)..(453): n is a, c, g, or t
  misc_feature (455)..(455): n is a, c, g, or t
  misc_feature (460)..(460): n is a, c, g, or t
  misc_feature (467)..(467): n is a, c, g, or t
  misc_feature (474)..(475): n is a, c, g, or t
  misc_feature (477)..(477): n is a, c, g, or t
  misc_feature (485)..(485): n is a, c, g, or t
  misc_feature (487)..(487): n is a, c, g, or t
  misc_feature (504)..(504): n is a, c, g, or t
  misc_feature (507)..(507): n is a, c, g, or t
  misc_feature (509)..(510): n is a, c, g, or t
  misc_feature (514)..(514): n is a, c, g, or t
  misc_feature (517)..(517): n is a, c, g, or t
  misc_feature (524)..(526): n is a, c, g, or t
  misc_feature (535)..(535): n is a, c, g, or t
  misc_feature (555)..(555): n is a, c, g, or t
  misc_feature (568)..(568): n is a, c, g, or t
  misc_feature (573)..(574): n is a, c, g, or t
  misc_feature (580)..(580): n is a, c, g, or t
  misc_feature (583)..(583): n is a, c, g, or t
  misc_feature (593)..(593): n is a, c, g, or t
  misc_feature (611)..(611): n is a, c, g, or t
  misc_feature (614)..(616): n is a, c, g, or t
  misc_feature (621)..(621): n is a, c, g, or t
  misc_feature (631)..(631): n is a, c, g, or t
  misc_feature (636)..(636): n is a, c, g, or t
  misc_feature (646)..(646): n is a, c, g, or t
  misc_feature (654)..(654): n is a, c, g, or t
  misc_feature (656)..(657): n is a, c, g, or t
  misc_feature (673)..(673): n is a, c, g, or t
  misc_feature (676)..(677): n is a, c, g, or t
  misc_feature (684)..(685): n is a, c, g, or t
  misc_feature (689)..(689): n is a, c, g, or t
  misc_feature (694)..(694): n is a, c, g, or t
  misc_feature (696)..(696): n is a, c, g, or t
  misc_feature (701)..(701): n is a, c, g, or t
  misc_feature (713)..(713): n is a, c, g, or t
  misc_feature (721)..(722): n is a, c, g, or t
  misc_feature (733)..(735): n is a, c, g, or t
  misc_feature (739)..(739): n is a, c, g, or t
  misc_feature (741)..(742): n is a, c, g, or t
  misc_feature (754)..(754): n is a, c, g, or t
  misc_feature (757)..(758): n is a, c, g, or t
  misc_feature (760)..(760): n is a, c, g, or t
  misc_feature (786)..(786): n is a, c, g, or t
  misc_feature (795)..(796): n is a, c, g, or t
  misc_feature (798)..(798): n is a, c, g, or t
  misc_feature (807)..(807): n is a, c, g, or t
  misc_feature (824)..(824): n is a, c, g, or t
  misc_feature (833)..(835): n is a, c, g, or t
  misc_feature (852)..(852): n is a, c, g, or t
  misc_feature (861)..(861): n is a, c, g, or t
  misc_feature (870)..(871): n is a, c, g, or t
  misc_feature (888)..(888): n is a, c, g, or t
  misc_feature (891)..(891): n is a, c, g, or t
  misc_feature (897)..(898): n is a, c, g, or t
  misc_feature (903)..(903): n is a, c, g, or t
cattccattgattccagggcccctttaaaaaatatatatatataccatntgggctgtagctgtagcttgatagtagagaagatgcttagcatttcataaggccatgggtttaatctccagcaaacaaaatgatgacgacgatgacgacgatgatgatggcgatgatggtgatgatggtgaccgtggtggtantggtggtantggtggtggtggtggtggtgaaaaacctaactggtnnctgtntcanaataatttctccacttcctatgaatccncactctactnggtggaaatacnactcatcnnttnaanncactanctgttcttgcnncggagcngagtccggttcccntcttccatttcnttngatctcntacatctgttactccttctcccnggtatccgattcctctggtcnctggccngctcccttctcnnctcttgcntgttccncnatccntctttcnccctctnnantgcaattnanggtctctcccggatctnccncnnggtnccngattttnnnccacttctncccttgggggcgctccttangtttcatcactcnctctnntatccntcnccctttctgnatccccgcttcttttttnctnnntttcntccctttccnccccnctcctaatcnatcccctngnntttttccctttcctcnttnntttcctnntccnttacncnccctnctctttccttgntctcttannccccctttctnnncttncnngacccccccccnctnntntttccctttctcctctctctccttcnccttctctnncnttctctctncttctccctcctcttcncctcttccnnnccccttttttttttctntcctccccncctctcctnntccccttgcttctttcntcntcttcnnctctncttccg

SEQ ID NO: 381 - DNA, 938 bp, Artificial Sequence
  Description of Artificial Sequence: Note = Synthetic Construct
  misc_feature (10)..(10): n is a, c, g, or t
  misc_feature (35)..(35): n is a, c, g, or t
  misc_feature (42)..(42): n is a, c, g, or t
  misc_feature (132)..(132): n is a, c, g, or t
  misc_feature (168)..(168): n is a, c, g, or t
  misc_feature (195)..(195): n is a, c, g, or t
  misc_feature (224)..(224): n is a, c, g, or t
  misc_feature (359)..(359): n is a, c, g, or t
  misc_feature (361)..(361): n is a, c, g, or t
  misc_feature (394)..(394): n is a, c, g, or t
  misc_feature (404)..(404): n is a, c, g, or t
  misc_feature (446)..(446): n is a, c, g, or t
  misc_feature (511)..(511): n is a, c, g, or t
  misc_feature (579)..(579): n is a, c, g, or t
  misc_feature (618)..(618): n is a, c, g, or t
  misc_feature (627)..(627): n is a, c, g, or t
  misc_feature (632)..(632): n is a, c, g, or t
  misc_feature (650)..(650): n is a, c, g, or t
  misc_feature (678)..(678): n is a, c, g, or t
  misc_feature (687)..(687): n is a, c, g, or t
  misc_feature (691)..(691): n is a, c, g, or t
  misc_feature (694)..(694): n is a, c, g, or t
  misc_feature (719)..(719): n is a, c, g, or t
  misc_feature (722)..(722): n is a, c, g, or t
  misc_feature (728)..(728): n is a, c, g, or t
  misc_feature (730)..(730): n is a, c, g, or t
  misc_feature (748)..(748): n is a, c, g, or t
  misc_feature (751)..(751): n is a, c, g, or t
  misc_feature (767)..(767): n is a, c, g, or t
  misc_feature (792)..(792): n is a, c, g, or t
  misc_feature (802)..(802): n is a, c, g, or t
  misc_feature (810)..(810): n is a, c, g, or t
  misc_feature (818)..(818): n is a, c, g, or t
  misc_feature (826)..(826): n is a, c, g, or t
  misc_feature (829)..(829): n is a, c, g, or t
  misc_feature (849)..(849): n is a, c, g, or t
  misc_feature (864)..(864): n is a, c, g, or t
  misc_feature (873)..(873): n is a, c, g, or t
  misc_feature (882)..(882): n is a, c, g, or t
  misc_feature (917)..(917): n is a, c, g, or t
caattcaatngaatcgaggaagaccggttactaangatatanaagaaaaaaataaatcgtgtgcctgcctttttttttttaattgcctgcttctccccacccccaaattaagttgcttagcaagggggaaanaagctttttcctcccttcagtagctcagcctgaaanaccccacctgtaggtttggcaagctanctgaagatcgtttcgcatgattgaacaanatggattgcacgcaggttctccggccgcttgggtggagaagctattcggctatgactgggcacaacagacaatcggctgctctgatgccgccgtgttccggctgtcagcgcaagggcgcccggttctttttgtcnanaccgacctgtccggtgccctgaatgaactgcangacgaagcancgcggctatcgtggctggccacgacaggcgttccttgcgcanctgtgctcgacgttgtcactgaaacgggaagggactggctgctattgggcgaaatgccggggcangatctcctgtcatctcaccttgctcctgccgaaaaaattatccatcatggctgatgcaatgcggcggntgcataccctgatccggctactgcccattcaacaccaancgaaactcncatcnaacaacacttatccggtngaacccgtctgtcatcaggatattgganaaaaacacngggntcncccaccaaatgtccccagctcaagngcnatgccnangggaagattctctgaacntgngaacctgcttccaatncatgtgaaaatgccctttctgatcncaaagtgcgntggtttgngaccttcngaatactngtncctaattctaaaatgggganggtaactcccttttngttccccanccacccctnttctttaaattcaaggacggtaaaatcctttcttnggggaaatttaaaaaaatttt

SEQ ID NO: 382 - DNA, 908 bp, Artificial Sequence
  Description of Artificial Sequence: Note = Synthetic Construct
  misc_feature (30)..(30): n is a, c, g, or t
  misc_feature (184)..(184): n is a, c, g, or t
  misc_feature (209)..(209): n is a, c, g, or t
  misc_feature (294)..(294): n is a, c, g, or t
  misc_feature (309)..(309): n is a, c, g, or t
  misc_feature (313)..(313): n is a, c, g, or t
  misc_feature (331)..(331): n is a, c, g, or t
  misc_feature (347)..(347): n is a, c, g, or t
  misc_feature (429)..(429): n is a, c, g, or t
  misc_feature (452)..(452): n is a, c, g, or t
  misc_feature (538)..(538): n is a, c, g, or t
  misc_feature (552)..(552): n is a, c, g, or t
  misc_feature (572)..(572): n is a, c, g, or t
  misc_feature (623)..(623): n is a, c, g, or t
  misc_feature (637)..(637): n is a, c, g, or t
  misc_feature (640)..(640): n is a, c, g, or t
  misc_feature (660)..(660): n is a, c, g, or t
  misc_feature (667)..(667): n is a, c, g, or t
  misc_feature (669)..(669): n is a, c, g, or t
  misc_feature (676)..(676): n is a, c, g, or t
  misc_feature (681)..(681): n is a, c, g, or t
  misc_feature (683)..(683): n is a, c, g, or t
  misc_feature (694)..(694): n is a, c, g, or t
  misc_feature (707)..(707): n is a, c, g, or t
  misc_feature (713)..(713): n is a, c, g, or t
  misc_feature (715)..(715): n is a, c, g, or t
  misc_feature (718)..(718): n is a, c, g, or t
  misc_feature (733)..(733): n is a, c, g, or t
  misc_feature (741)..(741): n is a, c, g, or t
  misc_feature (743)..(743): n is a, c, g, or t
  misc_feature (746)..(746): n is a, c, g, or t
  misc_feature (751)..(751): n is a, c, g, or t
  misc_feature (757)..(757): n is a, c, g, or t
  misc_feature (760)..(760): n is a, c, g, or t
  misc_feature (778)..(778): n is a, c, g, or t
  misc_feature (781)..(781): n is a, c, g, or t
  misc_feature (822)..(822): n is a, c, g, or t
  misc_feature (837)..(837): n is a, c, g, or t
  misc_feature (841)..(841): n is a, c, g, or t
  misc_feature (859)..(859): n is a, c, g, or t
  misc_feature (865)..(866): n is a, c, g, or t
  misc_feature (872)..(872): n is a, c, g, or t
  misc_feature (887)..(887): n is a, c, g, or t
  misc_feature (895)..(895): n is a, c, g, or t
  misc_feature (902)..(902): n is a, c, g, or t
  misc_feature (905)..(905): n is a, c, g, or t
cattccttgaatcaagagaccagtgttcantacgttaaaacgttgctctgtcttgaataacaagcttattacatgcgaatccaattgggaacctactgaattctctcttgggaacactcctccattgttggtgggattgcagactggtacaaccattctggaaatcagtctggaggttcctcanaaaattggacattgaactgcctgangatccagctatacctctcttgggcatatacccaaaagatgccccaacatataaaaaagacacgtgctccactatgttcatcgaanccttatttataatanccanaaactggaaagaatctanatgcccttcaacagangaatggatacagaaaatgtggtacatcctcacaatggaatattactcagctatcaaaaacaatgactttatgaaattcgtangcaaatggttggaactgggtgangtaactaatcacataaaaacacacatggtatgcactcattgataagtggctattaacccaaatgcttgaattacctacatgcctanaacaaatgaaaccnagacggatgatcaaaatgtnaatgctcctccttctttaaaatgggaacaaaaatacccttggccgggaatnaaaagcaagattanacnaaatgaaggacccatccganctgcccncntttgccntactntncgcccccattnacaaatgataacnaaaatncngcncaaaacgatttatcnccgaaaancnccnaatcncaaccnagnaatgcccccaacctgaanaantgaccgtgagatcaaaaaaggaaatgagggcaaaccttacntcccccaatccgganaccnccggatcggaaccgacgnccgttnnatcctnaaccgaggacggcgnaaacctanattgggnggnggg

SEQ ID NO: 383 - DNA, 2690 bp, Artificial Sequence
  Description of Artificial Sequence: Note = Synthetic Construct
  misc_feature (16)..(16): n is a, c, g, or t
  misc_feature (49)..(49): n is a, c, g, or t
  misc_feature (64)..(64): n is a, c, g, or t
  misc_feature (95)..(95): n is a, c, g, or t
  misc_feature (103)..(103): n is a, c, g, or t
  misc_feature (238)..(238): n is a, c, g, or t
  misc_feature (240)..(240): n is a, c, g, or t
  misc_feature (262)..(262): n is a, c, g, or t
  misc_feature (294)..(294): n is a, c, g, or t
  misc_feature (407)..(407): n is a, c, g, or t
  misc_feature (419)..(419): n is a, c, g, or t
  misc_feature (435)..(435): n is a, c, g, or t
  misc_feature (439)..(439): n is a, c, g, or t
  misc_feature (676)..(676): n is a, c, g, or t
  misc_feature (784)..(784): n is a, c, g, or t
  misc_feature (849)..(849): n is a, c, g, or t
  misc_feature (851)..(851): n is a, c, g, or t
  misc_feature (861)..(861): n is a, c, g, or t
  misc_feature (863)..(863): n is a, c, g, or t
  misc_feature (928)..(928): n is a, c, g, or t
  misc_feature (930)..(930): n is a, c, g, or t
  misc_feature (1031)..(1031): n is a, c, g, or t
  misc_feature (1097)..(1097): n is a, c, g, or t
  misc_feature (1127)..(1127): n is a, c, g, or t
  misc_feature (1156)..(1156): n is a, c, g, or t
  misc_feature (1165)..(1165): n is a, c, g, or t
  misc_feature (1172)..(1172): n is a, c, g, or t
  misc_feature (1199)..(1199): n is a, c, g, or t
  misc_feature (1266)..(1266): n is a, c, g, or t
  misc_feature (1532)..(1532): n is a, c, g, or t
  misc_feature (1887)..(1887): n is a, c, g, or t
  misc_feature (1895)..(1896): n is a, c, g, or t
  misc_feature (1909)..(1909): n is a, c, g, or t
  misc_feature (1920)..(1920): n is a, c, g, or t
  misc_feature (1926)..(1926): n is a, c, g, or t
  misc_feature (1966)..(1967): n is a, c, g, or t
  misc_feature (1969)..(1969): n is a, c, g, or t
  misc_feature (1973)..(1973): n is a, c, g, or t
  misc_feature (2026)..(2026): n is a, c, g, or t
  misc_feature (2028)..(2028): n is a, c, g, or t
  misc_feature (2048)..(2048): n is a, c, g, or t
  misc_feature (2077)..(2077): n is a, c, g, or t
  misc_feature (2125)..(2125): n is a, c, g, or t
  misc_feature (2151)..(2151): n is a, c, g, or t
  misc_feature (2157)..(2157): n is a, c, g, or t
  misc_feature (2162)..(2162): n is a, c, g, or t
  misc_feature (2170)..(2170): n is a, c, g, or t
  misc_feature (2176)..(2176): n is a, c, g, or t
  misc_feature (2211)..(2211): n is a, c, g, or t
  misc_feature (2214)..(2214): n is a, c, g, or t
  misc_feature (2234)..(2235): n is a, c, g, or t
  misc_feature (2238)..(2239): n is a, c, g, or t
  misc_feature (2241)..(2241): n is a, c, g, or t
  misc_feature (2245)..(2246): n is a, c, g, or t
  misc_feature (2248)..(2249): n is a, c, g, or t
  misc_feature (2252)..(2252): n is a, c, g, or t
  misc_feature (2257)..(2257): n is a, c, g, or t
  misc_feature (2259)..(2259): n is a, c, g, or t
  misc_feature (2261)..(2261): n is a, c, g, or t
  misc_feature (2263)..(2263): n is a, c, g, or t
  misc_feature (2267)..(2268): n is a, c, g, or t
  misc_feature (2270)..(2271): n is a, c, g, or t
  misc_feature (2274)..(2274): n is a, c, g, or t
  misc_feature (2281)..(2281): n is a, c, g, or t
  misc_feature (2291)..(2291): n is a, c, g, or t
  misc_feature (2294)..(2294): n is a, c, g, or t
  misc_feature (2296)..(2296): n is a, c, g, or t
  misc_feature (2299)..(2299): n is a, c, g, or t
  misc_feature (2304)..(2306): n is a, c, g, or t
  misc_feature (2308)..(2308): n is a, c, g, or t
  misc_feature (2310)..(2310): n is a, c, g, or t
  misc_feature (2318)..(2318): n is a, c, g, or t
  misc_feature (2320)..(2320): n is a, c, g, or t
  misc_feature (2324)..(2326): n is a, c, g, or t
  misc_feature (2328)..(2328): n is a, c, g, or t
  misc_feature (2331)..(2332): n is a, c, g, or t
  misc_feature (2336)..(2336): n is a, c, g, or t
  misc_feature (2338)..(2338): n is a, c, g, or t
  misc_feature (2340)..(2340): n is a, c, g, or t
  misc_feature (2343)..(2343): n is a, c, g, or t
  misc_feature (2345)..(2345): n is a, c, g, or t
  misc_feature (2347)..(2347): n is a, c, g, or t
  misc_feature (2350)..(2353): n is a, c, g, or t
  misc_feature (2357)..(2357): n is a, c, g, or t
  misc_feature (2363)..(2363): n is a, c, g, or t
  misc_feature (2365)..(2366): n is a, c, g, or t
  misc_feature (2368)..(2368): n is a, c, g, or t
  misc_feature (2375)..(2375): n is a, c, g, or t
  misc_feature (2377)..(2377): n is a, c, g, or t
  misc_feature (2379)..(2379): n is a, c, g, or t
  misc_feature (2382)..(2382): n is a, c, g, or t
  misc_feature (2386)..(2386): n is a, c, g, or t
  misc_feature (2388)..(2388): n is a, c, g, or t
  misc_feature (2391)..(2391): n is a, c, g, or t
  misc_feature (2393)..(2393): n is a, c, g, or t
  misc_feature (2395)..(2396): n is a, c, g, or t
  misc_feature (2399)..(2399): n is a, c, g, or t
  misc_feature (2402)..(2402): n is a, c, g, or t
  misc_feature (2406)..(2406): n is a, c, g, or t
  misc_feature (2411)..(2411): n is a, c, g, or t
  misc_feature (2413)..(2413): n is a, c, g, or t
  misc_feature (2415)..(2416): n is a, c, g, or t
  misc_feature (2418)..(2419): n is a, c, g, or t
  misc_feature (2421)..(2421): n is a, c, g, or t
  misc_feature (2429)..(2429): n is a, c, g, or t
  misc_feature (2431)..(2431): n is a, c, g, or t
  misc_feature (2434)..(2434): n is a, c, g, or t
  misc_feature (2436)..(2436): n is a, c, g, or t
  misc_feature (2440)..(2440): n is a, c, g, or t
  misc_feature (2444)..(2444): n is a, c, g, or t
  misc_feature (2449)..(2450): n is a, c, g, or t
  misc_feature (2452)..(2454): n is a, c, g, or t
  misc_feature (2462)..(2463): n is a, c, g, or t
  misc_feature (2465)..(2465): n is a, c, g, or t
  misc_feature (2467)..(2467): n is a, c, g, or t
  misc_feature (2470)..(2470): n is a, c, g, or t
  misc_feature (2472)..(2472): n is a, c, g, or t
  misc_feature (2475)..(2475): n is a, c, g, or t
  misc_feature (2484)..(2484): n is a, c, g, or t
  misc_feature (2487)..(2487): n is a, c, g, or t
  misc_feature (2490)..(2490): n is a, c, g, or t
  misc_feature (2494)..(2494): n is a, c, g, or t
  misc_feature (2497)..(2497): n is a, c, g, or t
  misc_feature (2499)..(2499): n is a, c, g, or t
  misc_feature (2501)..(2501): n is a, c, g, or t
  misc_feature (2505)..(2505): n is a, c, g, or t
  misc_feature (2508)..(2508): n is a, c, g, or t
  misc_feature (2519)..(2520): n is a, c, g, or t
  misc_feature (2523)..(2524): n is a, c, g, or t
  misc_feature (2526)..(2526): n is a, c, g, or t
  misc_feature (2530)..(2530): n is a, c, g, or t
  misc_feature (2540)..(2540): n is a, c, g, or t
  misc_feature (2549)..(2549): n is a, c, g, or t
  misc_feature (2551)..(2552): n is a, c, g, or t
  misc_feature (2554)..(2554): n is a, c, g, or t
  misc_feature (2557)..(2557): n is a, c, g, or t
  misc_feature (2560)..(2560): n is a, c, g, or t
  misc_feature (2570)..(2573): n is a, c, g, or t
  misc_feature (2578)..(2579): n is a, c, g, or t
  misc_feature (2581)..(2581): n is a, c, g, or t
  misc_feature (2587)..(2587): n is a, c, g, or t
  misc_feature (2589)..(2591): n is a, c, g, or t
  misc_feature (2594)..(2596): n is a, c, g, or t
  misc_feature (2599)..(2599): n is a, c, g, or t
  misc_feature (2603)..(2603): n is a, c, g, or t
  misc_feature (2609)..(2609): n is a, c, g, or t
  misc_feature (2615)..(2615): n is a, c, g, or t
  misc_feature (2621)..(2622): n is a, c, g, or t
  misc_feature (2628)..(2629): n is a, c, g, or t
  misc_feature (2638)..(2638): n is a, c, g, or t
  misc_feature (2640)..(2640): n is a, c, g, or t
  misc_feature (2642)..(2642): n is a, c, g, or t
  misc_feature (2645)..(2645): n is a, c, g, or t
  misc_feature (2651)..(2651): n is a, c, g, or t
  misc_feature (2654)..(2655): n is a, c, g, or t
  misc_feature (2658)..(2658): n is a, c, g, or t
  misc_feature (2662)..(2662): n is a, c, g, or t
  misc_feature (2668)..(2668): n is a, c, g, or t
  misc_feature (2671)..(2671): n is a, c, g, or t
  misc_feature (2673)..(2673): n is a, c, g, or t
  misc_feature (2680)..(2680): n is a, c, g, or t
  misc_feature (2682)..(2683): n is a, c, g, or t
  misc_feature (2686)..(2686): n is a, c, g, or t
  misc_feature (2688)..(2688): n is a, c, g, or t
cattccattgaatctnagttgccctccctctctccagccttaagagtangttttcttttttaantcaggtggcacttgttagaagcatgaccacntgaccaantgtcacagatctggtcagttatccggtaagatttgggtcagctctaacatctctgtaacctctgttaaaactctgtggctcctgtacaccatatctggaagtctgacctgtggatatcacttactagttataaananctcacacagttcatgctctgtnaacagtaaccgggcgcctccttccttttaganatgtcctacctcatccattgagacagtgggcaattgtgatgattaaaactttttctggcactgttactcaggaagctcagctcagtaactggtttgtcataacacgcaaatcnattactgggctnttagcataaagagtgnctanaaggcctaaaaagggtccgtgacctcagaagctacttcaactacgacagttgctaggcgaccttcctgcattgaggtaagaggcagggcagcccgcacaggttccgcctccacttccagccctagttcctgccgcctccggccgcaggagcatcaaagtgagcgactggtcggagaaccggcggcgcaagcgcgctacttcccgcgccgcactgagtgacgcacactccccctctangcctcagcctccgccccgccccccggagtaccgctccggccctgagcctccgctacatattcaccgggcccttcagccacgccgggccttcaccttgagaacctgtanaactggtgctgccctggcggcgttggtgatgggcgggcaagaacctggcgaatggggcggggaantngggaacaacngntaccaagacctactccggaggacagcggaattgctgcggtgcctggtgggaggggaaaaggagcnanaggggagggccgggccgcagggggtcgagggggtggggcttgcgggcggctgggacccggccccggcctggatctggagccgggagggccgaggctcccanccgggaccgatgggcggggcccaggtaaggagcccctgcagtctgcagtaagggactgagtcctanccgcagcggaagggaggtttctgagtatanggagggtctcagtgtcaccgtgctgtaanaacgctganagctgancagtgagcgcggggttcgggaaggaanggtgggaagagttaagttcggggggggggtgtcatgtgtctgccacgcccctacaggaagaggggtntgtgtgtttatgtgtgtgtgtgtttgtgtgtgtgtgtgtgtttatgtgtgtgtgtgtttatgtgtgtgtgtttgtgtgtgtgtgtgtacacactcataggggatggggcaacagggagggctctcaaactgagaaattagggctactacaagcaggacacaggcctccaatattccaggagagtgctctcaggagtggccctgtgaaggagtttgaaagaaactgggaattacatccttggcatagttttggaaacagtgggggangtgagggttgcagagaatgcctgaggctaagtctgggtatgatttaagtccagttgacaggaggtaggagattaatacactgaactcccagagggagcttgagagataggattagtaagtggtgttttagagaacagtagaccctattttctgtattttttttttttagaagacagtcttcccatactgacagtatttttggttaacatttctgtactgagaataggcatatcacaaacacataaacacacatgctcgaaatgctggggatacagtatatactctatatacaaattgtgtggagtagttagagtttgttgactgaacatggtaaaggagtgtagtaaatatgggnagtcctannaagtccatttgtncatgtattacnattaanagtgtcatactggttaaatgttcccccaggttcacacagnnantcancccccctggggccgtgtccggtgtttaaagcctgtttcctcctggatccccancnagaacacaaagttggaccanttggattgattttcccccttgccctcaancaaggggatgcccacaagtccctgggaaatccggtccaaccaactaancccccggagccttttaaaaagccaanctgggntgaanggggattntaaccncgccaccctggggaagggaacacctgaaagttcanccntttggggggggggaaggggnnctnncncctnncnncgntctcncncncnggtnncnntcnctttttncgggtcctcnttntngtntaggnnncntnggcctcgngncttnnngntcnncctntngnccntncntgnnnngtcncgtccncnncntcctagncncncgntgtncncantncnngtnccntgtngcccntntnncnntnttttctcncntcntnccgntctnctttnngnnncatcctcnncntncgngnttntcttccctnctnccnagantcncncnctcngtncctcgtgtccnntcnntnaccntcttctctcnctccacccntnngngtncgntctgcctttnnnnccctnntnttcccncnnnccnnncanctcntcttgncgctcntccatnnccgttnntactcgccncntnttnctttcnacnnccnttantcgctnagntnccctctntnntcncntg

SEQ ID NO: 384 - DNA, 922 bp, Artificial Sequence
  Description of Artificial Sequence: Note = Synthetic Construct
  misc_feature (15)..(15): n is a, c, g, or t
  misc_feature (25)..(25): n is a, c, g, or t
  misc_feature (34)..(34): n is a, c, g, or t
  misc_feature (38)..(38): n is a, c, g, or t
  misc_feature (44)..(44): n is a, c, g, or t
  misc_feature (54)..(54): n is a, c, g, or t
  misc_feature (57)..(58): n is a, c, g, or t
  misc_feature (63)..(65): n is a, c, g, or t
  misc_feature (67)..(67): n is a, c, g, or t
  misc_feature (75)..(75): n is a, c, g, or t
  misc_feature (78)..(78): n is a, c, g, or t
  misc_feature (90)..(93): n is a, c, g, or t
  misc_feature (96)..(96): n is a, c, g, or t
  misc_feature (107)..(108): n is a, c, g, or t
  misc_feature (110)..(110): n is a, c, g, or t
  misc_feature (112)..(112): n is a, c, g, or t
  misc_feature (122)..(122): n is a, c, g, or t
  misc_feature (128)..(128): n is a, c, g, or t
  misc_feature (132)..(133): n is a, c, g, or t
  misc_feature (142)..(145): n is a, c, g, or t
  misc_feature (154)..(154): n is a, c, g, or t
  misc_feature (160)..(160): n is a, c, g, or t
  misc_feature (170)..(171): n is a, c, g, or t
  misc_feature (175)..(175): n is a, c, g, or t
  misc_feature (180)..(180): n is a, c, g, or t
  misc_feature (187)..(187): n is a, c, g, or t
  misc_feature (194)..(194): n is a, c, g, or t
  misc_feature (198)..(199): n is a, c, g, or t
  misc_feature (205)..(205): n is a, c, g, or t
  misc_feature (226)..(226): n is a, c, g, or t
  misc_feature (235)..(235): n is a, c, g, or t
  misc_feature (237)..(237): n is a, c, g, or t
  misc_feature (251)..(251): n is a, c, g, or t
  misc_feature (253)..(254): n is a, c, g, or t
  misc_feature (258)..(260): n is a, c, g, or t
  misc_feature (266)..(267): n is a, c, g, or t
  misc_feature (269)..(269): n is a, c, g, or t
  misc_feature (273)..(274): n is a, c, g, or t
  misc_feature (280)..(280): n is a, c, g, or t
  misc_feature (284)..(285): n is a, c, g, or t
  misc_feature (287)..(287): n is a, c, g, or t
  misc_feature (290)..(290): n is a, c, g, or t
  misc_feature (297)..(297): n is a, c, g, or t
  misc_feature (301)..(301): n is a, c, g, or t
  misc_feature (310)..(310): n is a, c, g, or t
  misc_feature (315)..(315): n is a, c, g, or t
  misc_feature (323)..(323): n is a, c, g, or t
  misc_feature (327)..(327): n is a, c, g, or t
  misc_feature (337)..(337): n is a, c, g, or t
  misc_feature (342)..(342): n is a, c, g, or t
  misc_feature (346)..(346): n is a, c, g, or t
  misc_feature (350)..(350): n is a, c, g, or t
  misc_feature (352)..(352): n is a, c, g, or t
  misc_feature (368)..(368): n is a, c, g, or t
  misc_feature (371)..(371): n is a, c, g, or t
  misc_feature (375)..(375): n is a, c, g, or t
  misc_feature (383)..(383): n is a, c, g, or t
  misc_feature (389)..(389): n is a, c, g, or t
  misc_feature (398)..(398): n is a, c, g, or t
  misc_feature (404)..(405): n is a, c, g, or t
  misc_feature (411)..(411): n is a, c, g, or t
  misc_feature (420)..(420): n is a, c, g, or t
  misc_feature (429)..(429): n is a, c, g, or t
  misc_feature (434)..(434): n is a, c, g, or t
  misc_feature (443)..(443): n is a, c, g, or t
  misc_feature (453)..(453): n is a, c, g, or t
  misc_feature (478)..(478): n is a, c, g, or t
  misc_feature (480)..(480): n is a, c, g, or t
  misc_feature (484)..(484): n is a, c, g, or t
  misc_feature (486)..(486): n is a, c, g, or t
  misc_feature (490)..(490): n is a, c, g, or t
  misc_feature (499)..(499): n is a, c, g, or t
  misc_feature (505)..(505): n is a, c, g, or t
  misc_feature (508)..(508): n is a, c, g, or t
  misc_feature (520)..(520): n is a, c, g, or t
  misc_feature (525)..(526): n is a, c, g, or t
  misc_feature (531)..(531): n is a, c, g, or t
  misc_feature (546)..(546): n is a, c, g, or t
  misc_feature (551)..(551): n is a, c, g, or t
  misc_feature (553)..(553): n is a, c, g, or t
  misc_feature (561)..(561): n is a, c, g, or t
  misc_feature (567)..(567): n is a, c, g, or t
  misc_feature (569)..(569): n is a, c, g, or t
  misc_feature (575)..(575): n is a, c, g, or t
  misc_feature (581)..(581): n is a, c, g, or t
  misc_feature (583)..(583): n is a, c, g, or t
  misc_feature (590)..(591): n is a, c, g, or t
  misc_feature (598)..(598): n is a, c, g, or t
  misc_feature (603)..(603): n is a, c, g, or t
  misc_feature (612)..(612): n is a, c, g, or t
  misc_feature (618)..(618): n is a, c, g, or t
  misc_feature (628)..(628): n is a, c, g, or t
  misc_feature (631)..(632): n is a, c, g, or t
  misc_feature (636)..(636): n is a, c, g, or t
  misc_feature (642)..(642): n is a, c, g, or t
  misc_feature (647)..(647): n is a, c, g, or t
  misc_feature (649)..(649): n is a, c, g, or t
  misc_feature (654)..(654): n is a, c, g, or t
  misc_feature (657)..(657): n is a, c, g, or t
  misc_feature (660)..(660): n is a, c, g, or t
  misc_feature (664)..(664): n is a, c, g, or t
  misc_feature (670)..(671): n is a, c, g, or t
  misc_feature (677)..(677): n is a, c, g, or t
  misc_feature (679)..(679): n is a, c, g, or t
  misc_feature (682)..(683): n is a, c, g, or t
  misc_feature (688)..(688): n is a, c, g, or t
  misc_feature (693)..(693): n is a, c, g, or t
  misc_feature (698)..(698): n is a, c, g, or t
  misc_feature (702)..(702): n is a, c, g, or t
  misc_feature (708)..(708): n is a, c, g, or t
  misc_feature (716)..(717): n is a, c, g, or t
  misc_feature (725)..(725): n is a, c, g, or t
  misc_feature (738)..(738): n is a, c, g, or t
  misc_feature (740)..(740): n is a, c, g, or t
  misc_feature (744)..(744): n is a, c, g, or t
  misc_feature (747)..(748): n is a, c, g, or t
  misc_feature (752)..(752): n is a, c, g, or t
  misc_feature (756)..(756): n is a, c, g, or t
  misc_feature (762)..(763): n is a, c, g, or t
  misc_feature (805)..(805): n is a, c, g, or t
  misc_feature (811)..(812): n is a, c, g, or t
  misc_feature (818)..(818): n is a, c, g, or t
  misc_feature (821)..(821): n is a, c, g, or t
  misc_feature (835)..(835): n is a, c, g, or t
  misc_feature (858)..(858): n is a, c, g, or t
  misc_feature (860)..(860): n is a, c, g, or t
  misc_feature (863)..(863): n is a, c, g, or t
  misc_feature (867)..(868): n is a, c, g, or t
  misc_feature (872)..(872): n is a, c, g, or t
  misc_feature (875)..(876): n is a, c, g, or t
  misc_feature (881)..(883): n is a, c, g, or t
  misc_feature (895)..(895): n is a, c, g, or t
  misc_feature (897)..(897): n is a, c, g, or t
  misc_feature (913)..(913): n is a, c, g, or t
  misc_feature (920)..(920): n is a, c, g, or t
cattccattgatcantaagacccgntacgaggcncgantaatanttggtctatncgnnatatnnnantcttttcnggncaggatccaagnnnnctngggaaatcctnnanantcaggaatcnagggantcannggaatttcnnnngtctacatnttcccntcgtgccaanngtgnaaacngacttgncaagttnaccnngtgatntcagattagttcccccccaangtccctggngnaggtctccccccantnntggnnngagggnncnaatnnccttcntaanntnccnggagggncggnacatatcgnacccntcctcggngatngggataaatnccccncaanaatnanggggacgtattggtgnttncttntttacganttgctntaagttagnggtcgnnaggtcnatttgtccncgttccccnggagncccgaatgntaaactgatnatcatttcttccctaatatttttancnctcncnaagnacccctggntttttnggnatccctccgccnccccnnccaanccgggggacatttcnacgananaagttctncttgtnantccctngtaacncntcaactnnaaagctnacccngggtatttnggtccncggctgtaancanngctnagtccnggttngnctggnccntgntctnttcatnngtcgtnanttnnaagtnaagtnctctncccncgtctntttcctanngaaatttncctgtgaaccccngncttntcnntctnaacnttttanngaagcttctcggctttcgcctaattcgggtgttttgggttgnccccgnntatcgnacnttcttgatcctgtnttattttcttttctctccttcgngnttnaccnncagntcnnttccnnntttttttccatngngtttttctcccttttnttttttntg

SEQ ID NO: 385 - DNA, 889 bp, Artificial Sequence
  Description of Artificial Sequence: Note = Synthetic Construct
  misc_feature (19)..(19): n is a, c, g, or t
  misc_feature (173)..(173): n is a, c, g, or t
  misc_feature (484)..(484): n is a, c, g, or t
  misc_feature (488)..(488): n is a, c, g, or t
  misc_feature (524)..(524): n is a, c, g, or t
  misc_feature (545)..(545): n is a, c, g, or t
  misc_feature (549)..(549): n is a, c, g, or t
  misc_feature (559)..(559): n is a, c, g, or t
  misc_feature (569)..(569): n is a, c, g, or t
  misc_feature (590)..(590): n is a, c, g, or t
  misc_feature (596)..(596): n is a, c, g, or t
  misc_feature (603)..(603): n is a, c, g, or t
  misc_feature (640)..(640): n is a, c, g, or t
  misc_feature (642)..(642): n is a, c, g, or t
  misc_feature (646)..(646): n is a, c, g, or t
  misc_feature (648)..(648): n is a, c, g, or t
  misc_feature (662)..(662): n is a, c, g, or t
  misc_feature (664)..(664): n is a, c, g, or t
  misc_feature (669)..(669): n is a, c, g, or t
  misc_feature (701)..(701): n is a, c, g, or t
  misc_feature (713)..(713): n is a, c, g, or t
  misc_feature (717)..(717): n is a, c, g, or t
  misc_feature (719)..(719): n is a, c, g, or t
  misc_feature (746)..(746): n is a, c, g, or t
  misc_feature (754)..(754): n is a, c, g, or t
  misc_feature (756)..(757): n is a, c, g, or t
  misc_feature (771)..(771): n is a, c, g, or t
  misc_feature (773)..(774): n is a, c, g, or t
  misc_feature (777)..(777): n is a, c, g, or t
  misc_feature (781)..(782): n is a, c, g, or t
  misc_feature (791)..(791): n is a, c, g, or t
  misc_feature (797)..(797): n is a, c, g, or t
  misc_feature (803)..(803): n is a, c, g, or t
  misc_feature (807)..(808): n is a, c, g, or t
  misc_feature (814)..(815): n is a, c, g, or t
  misc_feature (821)..(821): n is a, c, g, or t
  misc_feature (829)..(830): n is a, c, g, or t
  misc_feature (846)..(847): n is a, c, g, or t
  misc_feature (853)..(853): n is a, c, g, or t
  misc_feature (858)..(858): n is a, c, g, or t
  misc_feature (860)..(860): n is a, c, g, or t
  misc_feature (871)..(871): n is a, c, g, or t
  misc_feature (879)..(879): n is a, c, g, or t
  misc_feature (886)..(886): n is a, c, g, or t
ggagctccaccgcggtggnccgcttctagccgggcggatcccccgggctgcaggaattcagtaggttcccaataggattcgcatgtaatgagcttgttattcatgatagagcaacgttttaccgaactgaaacactccttcattgtgaattctgtgtgaaattgttatccgcncacaattccacacaacatgagcgtcagaccccgaagaaaagatcaaaggatcttcttgagatcctttttttctgcgcgtaatctgctgcttgcgagcccccaaatgaaagacccccgctgacgggtagtcaatcactcagaggagaccctcccaaggaacagcgagaccacaagtcggatgcaactgcaagagggtttattggatacacgggtacccgggcgactcagtcaatcggaggactggcgcctagagaaggagtgagggctggataaagggaggatcgaggcggggtcgaacgaggaggttcaangggnagaaacggggcggattgaggaaaaaggaggcggagnttagggtgtcaaagggcttanccanggaggggggnaaaagccagnttcccaggtacgatgtagggncctggnttggtgncattcgggcaggtgaaaaaccttatttacctgggtantnaggncnggtaaagtccgctngngcatncgacgtaaaggttgccattttccaacaaaggntccaacgttttnttanantaccactgtttacagctcctaaatttnagttccangnnaacttaggggtganannttncccnngatttcttnaaactnaaccantacnnaaccanntttttnaaaaaccnnggtttctaccaaaaannttgggnttttntnctttaaaaccnctttgggnaaaaaanatg

SEQ ID NO: 386 - DNA, 1083 bp, Artificial Sequence
  Description of Artificial Sequence: Note = Synthetic Construct
  misc_feature (36)..(36): n is a, c, g, or t
  misc_feature (39)..(41): n is a, c, g, or t
  misc_feature (53)..(54): n is a, c, g, or t
  misc_feature (528)..(528): n is a, c, g, or t
  misc_feature (564)..(564): n is a, c, g, or t
  misc_feature (600)..(600): n is a, c, g, or t
  misc_feature (602)..(602): n is a, c, g, or t
  misc_feature (624)..(624): n is a, c, g, or t
  misc_feature (637)..(637): n is a, c, g, or t
  misc_feature (724)..(724): n is a, c, g, or t
  misc_feature (741)..(741): n is a, c, g, or t
  misc_feature (771)..(771): n is a, c, g, or t
  misc_feature (885)..(885): n is a, c, g, or t
  misc_feature (888)..(888): n is a, c, g, or t
  misc_feature (895)..(895): n is a, c, g, or t
  misc_feature (898)..(898): n is a, c, g, or t
  misc_feature (903)..(903): n is a, c, g, or t
  misc_feature (932)..(932): n is a, c, g, or t
  misc_feature (934)..(934): n is a, c, g, or t
  misc_feature (943)..(943): n is a, c, g, or t
  misc_feature (945)..(945): n is a, c, g, or t
  misc_feature (950)..(950): n is a, c, g, or t
  misc_feature (956)..(956): n is a, c, g, or t
  misc_feature (979)..(979): n is a, c, g, or t
  misc_feature (981)..(981): n is a, c, g, or t
  misc_feature (987)..(987): n is a, c, g, or t
  misc_feature (998)..(998): n is a, c, g, or t
  misc_feature (1038)..(1038): n is a, c, g, or t
  misc_feature (1043)..(1043): n is a, c, g, or t
  misc_feature (1053)..(1053): n is a, c, g, or t
  misc_feature (1058)..(1058): n is a, c, g, or t
  misc_feature (1060)..(1062): n is a, c, g, or t
  misc_feature (1066)..(1066): n is a, c, g, or t
  misc_feature (1081)..(1081): n is a, c, g, or t
cattcacacatttatctaggcccctgcattaacctnaannnttattttacacnnaagttcgaatcccaaatgtccccctgggagacaaggttcctgggagtatgtccatgggcagtggcaaagcactgccactcttcctaggtctctctgtggcctctctctccaaggcacatgaaatttaccacagcatatgcatttccttttctttttgagacagggtttctctgtgtagacttagctgtcctggaactcattctggagtttcttatcaggccagcctccaactcgtggagatccacttgtctctgcttcctgagtgccaccacccctggcctggcatatacacagtcaatccagaaaccgctttgctatcttggaactaatgaaggtagaggagaggacctctggttcatctggtgctgataactgagggacagaaccccaagggaggagcccagtctggggaccaacatcatgttacagagaagcagtttccagcatcacaagtatcaacatcctgcttctaangaagacctagaactgactgcattggagggaaagcangatctgaatatttgcattttcctgttttgccctaangntctgtccttaacttcctaatanaaccaaggtgcanggaccaaactgggaagacaactgctgccacacaagtcctggggacaaggaacatgctggcttccaactccagtatactgatctacanagagtatgatgtctggntccttcccaacttgggcttacaatgcaagnaagttacttcaagacttggacggtgccaaggccacatggaaagacccaaactgtttttataaggtaatgggatgaattataaataatggttcccttggttggaaaaattcccangancaaaggntancaaancctcccacggtaattcacttggatcaacnancaggtcatngncccanttgggnagggccttgtaaaggtttggttnanctaacntctgacaaacnccccccttggcccttcaaaaataagggaccaccttgtaanttttnaaaacctggnaaaanannnccanaattgcttaagggtncc

SEQ ID NO: 387 - DNA, 977 bp, Artificial Sequence
  Description of Artificial Sequence: Note = Synthetic Construct
  misc_feature (22)..(22): n is a, c, g, or t
  misc_feature (273)..(273): n is a, c, g, or t
  misc_feature (329)..(329): n is a, c, g, or t
  misc_feature (372)..(372): n is a, c, g, or t
  misc_feature (526)..(526): n is a, c, g, or t
  misc_feature (565)..(565): n is a, c, g, or t
  misc_feature (577)..(577): n is a, c, g, or t
  misc_feature (592)..(592): n is a, c, g, or t
  misc_feature (597)..(597): n is a, c, g, or t
  misc_feature (610)..(610): n is a, c, g, or t
  misc_feature (653)..(653): n is a, c, g, or t
  misc_feature (689)..(689): n is a, c, g, or t
  misc_feature (696)..(696): n is a, c, g, or t
  misc_feature (738)..(738): n is a, c, g, or t
  misc_feature (748)..(748): n is a, c, g, or t
  misc_feature (751)..(752): n is a, c, g, or t
  misc_feature (764)..(764): n is a, c, g, or t
  misc_feature (771)..(771): n is a, c, g, or t
  misc_feature (783)..(783): n is a, c, g, or t
  misc_feature (813)..(813): n is a, c, g, or t
  misc_feature (827)..(828): n is a, c, g, or t
  misc_feature (830)..(830): n is a, c, g, or t
  misc_feature (845)..(845): n is a, c, g, or t
  misc_feature (875)..(875): n is a, c, g, or t
  misc_feature (882)..(882): n is a, c, g, or t
  misc_feature (889)..(889): n is a, c, g, or t
  misc_feature (893)..(893): n is a, c, g, or t
  misc_feature (895)..(895): n is a, c, g, or t
  misc_feature (899)..(899): n is a, c, g, or t
  misc_feature (903)..(903): n is a, c, g, or t
  misc_feature (923)..(924): n is a, c, g, or t
  misc_feature (929)..(929): n is a, c, g, or t
  misc_feature (933)..(933): n is a, c, g, or t
  misc_feature (935)..(935): n is a, c, g, or t
  misc_feature (938)..(938): n is a, c, g, or t
  misc_feature (943)..(943): n is a, c, g, or t
  misc_feature (945)..(946): n is a, c, g, or t
  misc_feature (962)..(962): n is a, c, g, or t
  misc_feature (969)..(969): n is a, c, g, or t
  misc_feature (972)..(973): n is a, c, g, or t
caattcacacagatttcagctntccagcaatctgacacaatcttctggcctcttcaggcacctgcatggttccacagactgtcacacccacgtacatagatagtcaaaatctagagcactgtttctatacctgtgagttgcaacccctttgggagtgcggtcaaatgaccctatcacaggggtctcaaatgagatatcctgcatatcaaatatttacattatgattcatagtagtaccagaattacagttatgaagttacaaaataattttangcctgagaagccacaacacatgcataactgtattaaaatgttacagcattagcaangttgagaaatactggtctagagccattccttgtgctgataaangtggcagtgagcattatctttctgtctccacaccactagcaaatttttttctctatatataaacatgtaatatgagacagtctgaatccacgaagcacggtctgactccaagaacaaaggatcgtattccctgaaaagcaaaactgtgtttggnactgactgtgtgcccaagtttcccttttctgactcctanaggtctgtaccngggctcctgaagcanagacncctccaaccttanctgggtgtccaataagttatgcctcaaaaccagactgttaaanatggggccaactaccagaaatcatccgatgtgtggnattgggnaggaaaggttggaaaaattccttttggggcgcttcgtttaangggatttcgnaannattaaacggctnccaaagnttcgccttaagntagtcatcaattgacaacccgtggccccanctgtaaacgtaatnnanggatccaattcccanttcaattaaccccgtgaaacaatccaccgnaatcaangtccacngcananaggncccngggaaggtttaaattcactnnaaggnttcngnggnggggngnnctaaaaaagcctcccnggttagnaannatta

SEQ ID NO: 388 - DNA, 175 bp, Artificial Sequence
  Description of Artificial Sequence: Note = Synthetic Construct
  misc_feature (11)..(11): n is a, c, g, or t
  misc_feature (14)..(14): n is a, c, g, or t
  misc_feature (32)..(32): n is a, c, g, or t
  misc_feature (34)..(34): n is a, c, g, or t
  misc_feature (79)..(79): n is a, c, g, or t
  misc_feature (103)..(103): n is a, c, g, or t
  misc_feature (144)..(144): n is a, c, g, or t
caattcatttngantctgagagcccatggaananattattccaagaaatctttgaccagaaaggagttagggttttcanattaggaaagtggaatccacaganttcccttgacagataatataaaaaggactctggggtgtcanaatggtgggcattaacctgatcttccacttg

SEQ ID NO: 389 - DNA, 960 bp, Artificial Sequence
  Description of Artificial Sequence: Note = Synthetic Construct
  misc_feature (22)..(22): n is a, c, g, or t
  misc_feature (289)..(289): n is a, c, g, or t
  misc_feature (357)..(357): n is a, c, g, or t
  misc_feature (424)..(424): n is a, c, g, or t
  misc_feature (524)..(524): n is a, c, g, or t
  misc_feature (604)..(604): n is a, c, g, or t
  misc_feature (614)..(614): n is a, c, g, or t
  misc_feature (653)..(653): n is a, c, g, or t
  misc_feature (683)..(683): n is a, c, g, or t
  misc_feature (707)..(707): n is a, c, g, or t
  misc_feature (776)..(776): n is a, c, g, or t
  misc_feature (785)..(785): n is a, c, g, or t
  misc_feature (793)..(793): n is a, c, g, or t
  misc_feature (805)..(805): n is a, c, g, or t
  misc_feature (810)..(810): n is a, c, g, or t
  misc_feature (851)..(852): n is a, c, g, or t
  misc_feature (858)..(859): n is a, c, g, or t
  misc_feature (863)..(864): n is a, c, g, or t
  misc_feature (866)..(869): n is a, c, g, or t
  misc_feature (873)..(873): n is a, c, g, or t
  misc_feature (876)..(876): n is a, c, g, or t
  misc_feature (881)..(882): n is a, c, g, or t
  misc_feature (888)..(888): n is a, c, g, or t
  misc_feature (896)..(896): n is a, c, g, or t
  misc_feature (903)..(903): n is a, c, g, or t
  misc_feature (913)..(915): n is a, c, g, or t
  misc_feature (920)..(921): n is a, c, g, or t
  misc_feature (939)..(939): n is a, c, g, or t
  misc_feature (948)..(948): n is a, c, g, or t
cattcaattaatctccattggncttgctttggactgtgaaaaactctacaattttacttcagatgatcaaccggaagagatggcttggatctcattatccgaatttccatcaagaaccaatgtgccactctctaaataagctacagcaccacataagtcaccaaaagccttaaatccaacccacttattccacagcaagattcaacgaaatcttctcagtcagcccttgctctcctgccttctctctgtcaaggatccctatatccctggctggcctcaaactcactangtagcttagcaggactttcaacttctgaccctctttgcctctgcctcacaagccctgagatctacgtnagcaagcaccacatagtcaagcactctatctactgagctatatcccaattctcctctttccaattcnacgaaacactgataagagacgaagcaaggagcaacgagaagcacgaagacatacatgtcctccagcagcttaaaaatgtttgttcctcctgaaaaataancacctcaggtcttcctttaactatctggccttctctgcctcagtactgcctacggaaactttaccaatgtgtttggggangctcaaatcnggtgaaactttaaaacaatatgcatggtgtcttccaganagaaaacaactaacctaatgaattgtgtcnccaactctatctgtgcatcctaanaatctgcgtgttagcttgttttataaaatccttgaaaggtggaagaaggttacatttgaatgctatgtntggcaaaantgggtcantccaccaacccncgggntcaaatgcgtatccttccaggttgggccccttgggtccaannccctgnntttnncnnnnaaanccnatttnnttaacnttaaattnttccctnttcaatggcnnncgctnntcaaattgaatccgccantggctttanttaaaaatttgt

SEQ ID NO: 390 - DNA, 151 bp, Artificial Sequence
  Description of Artificial Sequence: Note = Synthetic Construct
  misc_feature (10)..(10): n is a, c, g, or t
  misc_feature (23)..(23): n is a, c, g, or t
caattcaatngacccactgtacntttggcaagctagctgaggatcgtttcgcatgattgaacaagatggattgcacgcaggttctccggccgcttgggtggagaagctattcggctatgactgggcacaacagacaatcggctgctctgat

SEQ ID NO: 391 - DNA, 836 bp, Artificial Sequence
  Description of Artificial Sequence: Note = Synthetic Construct
  misc_feature (1)..(1): n is a, c, g, or t
  misc_feature (6)..(8): n is a, c, g, or t
  misc_feature (11)..(14): n is a, c, g, or t
  misc_feature (16)..(16): n is a, c, g, or t
  misc_feature (20)..(20): n is a, c, g, or t
  misc_feature (24)..(27): n is a, c, g, or t
  misc_feature (29)..(29): n is a, c, g, or t
  misc_feature (32)..(32): n is a, c, g, or t
  misc_feature (52)..(52): n is a, c, g, or t
  misc_feature (56)..(61): n is a, c, g, or t
  misc_feature (64)..(66): n is a, c, g, or t
  misc_feature (68)..(68): n is a, c, g, or t
  misc_feature (70)..(70): n is a, c, g, or t
  misc_feature (74)..(77): n is a, c, g, or t
  misc_feature (79)..(80): n is a, c, g, or t
  misc_feature (86)..(86): n is a, c, g, or t
  misc_feature (91)..(91): n is a, c, g, or t
  misc_feature (94)..(94): n is a, c, g, or t
  misc_feature (96)..(96): n is a, c, g, or t
  misc_feature (102)..(102): n is a, c, g, or t
  misc_feature (104)..(104): n is a, c, g, or t
  misc_feature (108)..(110): n is a, c, g, or t
  misc_feature (115)..(115): n is a, c, g, or t
  misc_feature (119)..(121): n is a, c, g, or t
  misc_feature (123)..(126): n is a, c, g, or t
  misc_feature (128)..(129): n is a, c, g, or t
  misc_feature (131)..(133): n is a, c, g, or t
  misc_feature (135)..(138): n is a, c, g, or t
  misc_feature (141)..(142): n is a, c, g, or t
  misc_feature (146)..(148): n is a, c, g, or t
  misc_feature (150)..(150): n is a, c, g, or t
  misc_feature (152)..(152): n is a, c, g, or t
  misc_feature (154)..(154): n is a, c, g, or t
  misc_feature (156)..(157): n is a, c, g, or t
  misc_feature (160)..(166): n is a, c, g, or t
  misc_feature (169)..(169): n is a, c, g, or t
  misc_feature (174)..(174): n is a, c, g, or t
  misc_feature (178)..(178): n is a, c, g, or t
  misc_feature (181)..(181): n is a, c, g, or t
  misc_feature (183)..(185): n is a, c, g, or t
  misc_feature (189)..(190): n is a, c, g, or t
  misc_feature (192)..(192): n is a, c, g, or t
  misc_feature (198)..(200): n is a, c, g, or t
  misc_feature (205)..(205): n is a, c, g, or t
  misc_feature (207)..(207): n is a, c, g, or t
  misc_feature (209)..(210): n is a, c, g, or t
  misc_feature (213)..(214): n is a, c, g, or t
  misc_feature (225)..(225): n is a, c, g, or t
  misc_feature (229)..(229): n is a, c, g, or t
  misc_feature (237)..(237): n is a, c, g, or t
  misc_feature (239)..(242): n is a, c, g, or t
  misc_feature (244)..(246): n is a, c, g, or t
  misc_feature (249)..(250): n is a, c, g, or t
  misc_feature (253)..(254): n is a, c, g, or t
  misc_feature (257)..(261): n is a, c, g, or t
  misc_feature (267)..(268): n is a, c, g, or t
  misc_feature (270)..(270): n is a, c, g, or t
  misc_feature (274)..(274): n is a, c, g, or t
  misc_feature (278)..(278): n is a, c, g, or t
  misc_feature (280)..(281): n is a, c, g, or t
  misc_feature (283)..(283): n is a, c, g, or t
  misc_feature (285)..(285): n is a, c, g, or t
  misc_feature (288)..(288): n is a, c, g, or t
  misc_feature (294)..(294): n is a, c, g, or t
  misc_feature (299)..(299): n is a, c, g, or t
  misc_feature (301)..(301): n is a, c, g, or t
  misc_feature (322)..(322): n is a, c, g, or t
  misc_feature (326)..(329): n is a, c, g, or t
  misc_feature (336)..(337): n is a, c, g, or t
  misc_feature (352)..(352): n is a, c, g, or t
  misc_feature (356)..(356): n is a, c, g, or t
  misc_feature (358)..(358): n is a, c, g, or t
  misc_feature (361)..(361): n is a, c, g, or t
  misc_feature (363)..(364): n is a, c, g, or t
  misc_feature (369)..(369): n is a, c, g, or t
  misc_feature (379)..(379): n is a, c, g, or t
  misc_feature (387)..(387): n is a, c, g, or t
  misc_feature (389)..(389): n is a, c, g, or t
  misc_feature (391)..(391): n is a, c, g, or t
  misc_feature (396)..(397): n is a, c, g, or t
  misc_feature (404)..(404): n is a, c, g, or t
  misc_feature (406)..(406): n is a, c, g, or t
  misc_feature (411)..(412): n is a, c, g, or t
  misc_feature (415)..(416): n is a, c, g, or t
  misc_feature (420)..(420): n is a, c, g, or t
  misc_feature (422)..(422): n is a, c, g, or t
  misc_feature (425)..(426): n is a, c, g, or t
  misc_feature (429)..(430): n is a, c, g, or t
  misc_feature (435)..(435): n is a, c, g, or t
  misc_feature (439)..(439): n is a, c, g, or t
  misc_feature (445)..(445): n is a, c, g, or t
  misc_feature (455)..(455): n is a, c, g, or t
  misc_feature (464)..(464): n is a, c, g, or t
  misc_feature (467)..(468): n is a, c, g, or t
  misc_feature (478)..(478): n is a, c, g, or t
  misc_feature (481)..(481): n is a, c, g, or t
  misc_feature (502)..(502): n is a, c, g, or t
  misc_feature (518)..(519): n is a, c, g, or t
  misc_feature (531)..(531): n is a, c, g, or t
  misc_feature (543)..(543): n is a, c, g, or t
  misc_feature (546)..(546): n is a, c, g, or t
  misc_feature (551)..(551): n is a, c, g, or t
  misc_feature (553)..(553): n is a, c, g, or t
  misc_feature (561)..(562): n is a, c, g, or t
  misc_feature (566)..(566): n is a, c, g, or t
  misc_feature (573)..(573): n is a, c, g, or t
  misc_feature (581)..(581): n is a, c, g, or t
  misc_feature (598)..(598): n is a, c, g, or t
  misc_feature (606)..(606): n is a, c, g, or t
  misc_feature (617)..(617): n is a, c, g, or t
  misc_feature (623)..(623): n is a, c, g, or t
  misc_feature (632)..(632): n is a, c, g, or t
  misc_feature (641)..(642): n is a, c, g, or t
  misc_feature (648)..(648): n is a, c, g, or t
  misc_feature (657)..(658): n is a, c, g, or t
  misc_feature (662)..(663): n is a, c, g, or t
  misc_feature (669)..(669): n is a, c, g, or t
  misc_feature (672)..(672): n is a, c, g, or t
  misc_feature (679)..(679): n is a, c, g, or t
  misc_feature (683)..(683): n is a, c, g, or t
  misc_feature (692)..(693): n is a, c, g, or t
  misc_feature (716)..(716): n is a, c, g, or t
  misc_feature (720)..(721): n is a, c, g, or t
  misc_feature (723)..(723): n is a, c, g, or t
  misc_feature (725)..(726): n is a, c, g, or t
  misc_feature (733)..(733): n is a, c, g, or t
  misc_feature (737)..(737): n is a, c, g, or t
  misc_feature (740)..(740): n is a, c, g, or t
  misc_feature (754)..(754): n is a, c, g, or t
  misc_feature (763)..(763): n is a, c, g, or t
  misc_feature (765)..(765): n is a, c, g, or t
  misc_feature (767)..(768): n is a, c, g, or t
  misc_feature (778)..(778): n is a, c, g, or t
  misc_feature (782)..(782): n is a, c, g, or t
  misc_feature (786)..(786): n is a, c, g, or t
  misc_feature (790)..(790): n is a, c, g, or t
  misc_feature (792)..(792): n is a, c, g, or t
  misc_feature (794)..(796): n is a, c, g, or t
  misc_feature (799)..(800): n is a, c, g, or t
  misc_feature (803)..(804): n is a, c, g, or t
  misc_feature (813)..(813): n is a, c, g, or t
  misc_feature (819)..(819): n is a, c, g, or t
  misc_feature (827)..(827): n is a, c, g, or t
  misc_feature (830)..(830): n is a, c, g, or t
  misc_feature (833)..(833): n is a, c, g, or t
nactcnnnatnnnnanaganagannnncngtnatccagtctcaactccagcnctcnnnnnnatnnncngntggnnnntnnagagcntgagncantnatgaancntaannntttcntgtnnncnnnngnnannngnnnncanntccnnncncnantnnagnnnnnnncanctagntganaancnnntctnncnaatgannnagatngntnncanncaggtgtctcnggcngactgggngnnnncnnnatnncgnntannnnngtgcannangcantatngnntncnctnatgccnccgtntnccggctgtcagtacatgggcnctcnnnngcttttnncaacaatgacttgtngcgntnccntnnatganctgcaggacnagtatcancncnatcannggtggtnanaacgnncgnncagnancannggnnacgcngttnacactntatcagcaanaggctgctntannaggaaacgtnccnaggcaggattcctgtcatttnccttggcctgccacannatgtcatcatgntgttgaattcangtnctacntnggcataannagcnaactgcnatttgccnaccattccacccgtaantcgatcgncacgttccggntgaacnggccttccntaaactgcnncgttancctttggannttgnntctaantgntccaggntaangcagttcgnnagatattcaagtgcatggaacanctcnnancnngggaatngccnttnattttatttcccgngatgtcccnantnnaacttgaccnattncaanttgngngnnnctnntgnnttaaccccnaaaaanttttttcnttnagnttc

SEQ ID NO: 392 - DNA, 813 bp, Artificial Sequence
  Description of Artificial Sequence: Note = Synthetic Construct
  misc_feature (3)..(4): n is a, c, g, or t
  misc_feature (8)..(9): n is a, c, g, or t
  misc_feature (13)..(13): n is a, c, g, or t
  misc_feature (17)..(18): n is a, c, g, or t
  misc_feature (20)..(22): n is a, c, g, or t
  misc_feature (24)..(25): n is a, c, g, or t
  misc_feature (27)..(27): n is a, c, g, or t
  misc_feature (31)..(32): n is a, c, g, or t
  misc_feature (37)..(38): n is a, c, g, or t
  misc_feature (41)..(41): n is a, c, g, or t
  misc_feature (43)..(43): n is a, c, g, or t
  misc_feature (48)..(51): n is a, c, g, or t
  misc_feature (53)..(54): n is a, c, g, or t
  misc_feature (59)..(59): n is a, c, g, or t
  misc_feature (68)..(69): n is a, c, g, or t
  misc_feature (75)..(77): n is a, c, g, or t
  misc_feature (79)..(80): n is a, c, g, or t
  misc_feature (84)..(84): n is a, c, g, or t
  misc_feature (86)..(86): n is a, c, g, or t
  misc_feature (90)..(90): n is a, c, g, or t
  misc_feature (114)..(115): n is a, c, g, or t
  misc_feature (118)..(120): n is a, c, g, or t
  misc_feature (122)..(122): n is a, c, g, or t
  misc_feature (128)..(128): n is a, c, g, or t
  misc_feature (133)..(133): n is a, c, g, or t
  misc_feature (135)..(137): n is a, c, g, or t
  misc_feature (143)..(143): n is a, c, g, or t
  misc_feature (147)..(147): n is a, c, g, or t
  misc_feature (166)..(166): n is a, c, g, or t
  misc_feature (169)..(169): n is a, c, g, or t
  misc_feature (171)..(171): n is a, c, g, or t
  misc_feature (182)..(182): n is a, c, g, or t
  misc_feature (192)..(193): n is a, c, g, or t
  misc_feature (195)..(195): n is a, c, g, or t
  misc_feature (201)..(201): n is a, c, g, or t
  misc_feature (205)..(205): n is a, c, g, or t
  misc_feature (212)..(212): n is a, c, g, or t
  misc_feature (215)..(216): n is a, c, g, or t
  misc_feature (218)..(219): n is a, c, g, or t
  misc_feature (229)..(230): n is a, c, g, or t
  misc_feature (235)..(235): n is a, c, g, or t
  misc_feature (239)..(239): n is a, c, g, or t
  misc_feature (242)..(243): n is a, c, g, or t
  misc_feature (250)..(250): n is a, c, g, or t
  misc_feature (257)..(258): n is a, c, g, or t
  misc_feature (262)..(265): n is a, c, g, or t
  misc_feature (269)..(273): n is a, c, g, or t
  misc_feature (277)..(277): n is a, c, g, or t
  misc_feature (280)..(281): n is a, c, g, or t
  misc_feature (288)..(288): n is a, c, g, or t
  misc_feature (291)..(293): n is a, c, g, or t
  misc_feature (296)..(297): n is a, c, g, or t
  misc_feature (310)..(311): n is a, c, g, or t
  misc_feature (313)..(313): n is a, c, g, or t
  misc_feature (319)..(319): n is a, c, g, or t
  misc_feature (321)..(323): n is a, c, g, or t
  misc_feature (329)..(330): n is a, c, g, or t
  misc_feature (332)..(333): n is a, c, g, or t
  misc_feature (346)..(346): n is a, c, g, or t
  misc_feature (351)..(351): n is a, c, g, or t
  misc_feature (360)..(360): n is a, c, g, or t
  misc_feature (364)..(366): n is a, c, g, or t
  misc_feature (371)..(371): n is a, c, g, or t
  misc_feature (373)..(373): n is a, c, g, or t
  misc_feature (375)..(375): n is a, c, g, or t
  misc_feature (377)..(378): n is a, c, g, or t
  misc_feature (382)..(382): n is a, c, g, or t
  misc_feature (384)..(384): n is a, c, g, or t
  misc_feature (387)..(388): n is a, c, g, or t
  misc_feature (394)..(394): n is a, c, g, or t
  misc_feature (396)..(397): n is a, c, g, or t
  misc_feature (399)..(399): n is a, c, g, or t
  misc_feature (406)..(407): n is a, c, g, or t
  misc_feature (417)..(417): n is a, c, g, or t
  misc_feature (423)..(425): n is a, c, g, or t
  misc_feature (427)..(427): n is a, c, g, or t
  misc_feature (430)..(430): n is a, c, g, or t
  misc_feature (432)..(434): n is a, c, g, or t
  misc_feature (436)..(438): n is a, c, g, or t
  misc_feature (441)..(441): n is a, c, g, or t
  misc_feature (443)..(443): n is a, c, g, or t
  misc_feature (451)..(451): n is a, c, g, or t
  misc_feature (454)..(455): n is a, c, g, or t
  misc_feature (457)..(457): n is a, c, g, or t
  misc_feature (461)..(461): n is a, c, g, or t
  misc_feature (466)..(466): n is a, c, g, or t
  misc_feature (475)..(476): n is a, c, g, or t
  misc_feature (484)..(484): n is a, c, g, or t
  misc_feature (493)..(494): n is a, c, g, or t
  misc_feature (501)..(502): n is a, c, g, or t
  misc_feature (516)..(516): n is a, c, g, or t
  misc_feature (518)..(520): n is a, c, g, or t
  misc_feature (527)..(528): n is a, c, g, or t
  misc_feature (531)..(531): n is a, c, g, or t
  misc_feature (534)..(534): n is a, c, g, or t
  misc_feature (539)..(539): n is a, c, g, or t
  misc_feature (546)..(546): n is a, c, g, or t
  misc_feature (549)..(549): n is a, c, g, or t
  misc_feature (559)..(559): n is a, c, g, or t
  misc_feature (562)..(563): n is a, c, g, or t
  misc_feature (566)..(566): n is a, c, g, or t
  misc_feature (570)..(573): n is a, c, g, or t
  misc_feature (575)..(575): n is a, c, g, or t
  misc_feature (577)..(578): n is a, c, g, or t
  misc_feature (583)..(583): n is a, c, g, or t
  misc_feature (587)..(587): n is a, c, g, or t
  misc_feature (591)..(593): n is a, c, g, or t
  misc_feature (600)..(600): n is a, c, g, or t
  misc_feature (605)..(605): n is a, c, g, or t
  misc_feature (608)..(610): n is a, c, g, or t
  misc_feature (613)..(613): n is a, c, g, or t
  misc_feature (616)..(618): n is a, c, g, or t
  misc_feature (622)..(623): n is a, c, g, or t
  misc_feature (625)..(626): n is a, c, g, or t
  misc_feature (630)..(631): n is a, c, g, or t
  misc_feature (633)..(633): n is a, c, g, or t
  misc_feature (635)..(635): n is a, c, g, or t
  misc_feature (637)..(637): n is a, c, g, or t
  misc_feature (639)..(639): n is a, c, g, or t
  misc_feature (643)..(643): n is a, c, g, or t
  misc_feature (646)..(646): n is a, c, g, or t
  misc_feature (655)..(655): n is a, c, g, or t
  misc_feature (657)..(657): n is a, c, g, or t
  misc_feature (660)..(660): n is a, c, g, or t
  misc_feature (662)..(662): n is a, c, g, or t
  misc_feature (675)..(677): n is a, c, g, or t
  misc_feature (679)..(680): n is a, c, g, or t
  misc_feature (686)..(686): n is a, c, g, or t
  misc_feature (689)..(691): n is a, c, g, or t
  misc_feature (694)..(694): n is a, c, g, or t
  misc_feature (703)..(703): n is a, c, g, or t
  misc_feature (719)..(719): n is a, c, g, or t
  misc_feature (721)..(721): n is a, c, g, or t
  misc_feature (723)..(724): n is a, c, g, or t
  misc_feature (726)..(727): n is a, c, g, or t
  misc_feature (731)..(731): n is a, c, g, or t
  misc_feature (733)..(733): n is a, c, g, or t
  misc_feature (737)..(737): n is a, c, g, or t
  misc_feature (743)..(743): n is a, c, g, or t
  misc_feature (748)..(748): n is a, c, g, or t
  misc_feature (754)..(754): n is a, c, g, or t
  misc_feature (764)..(764): n is a, c, g, or t
  misc_feature (767)..(767): n is a, c, g, or t
  misc_feature (770)..(770): n is a, c, g, or t
  misc_feature (772)..(772): n is a, c, g, or t
  misc_feature (779)..(779): n is a, c, g, or t
  misc_feature (791)..(791): n is a, c, g, or t
  misc_feature (795)..(796): n is a, c, g, or t
  misc_feature (799)..(802): n is a, c, g, or t
  misc_feature (808)..(810): n is a, c, g, or t
  misc_feature (812)..(812): n is a, c, g, or t
canncaanngaancganncnnncnnancagnnagacnnccnangaagnnnngnnacagngaaaccagnncagagnnngnnagcncngagnaaacgaaaaagaaaacaagaaacnngannnangggccnacagnannnaaggcncagngaggaccacccaggggaangcncngcgcccagacnaaaaacagcnncnccagcncacnaccgaangannanngcacaacacnngaaanaaanaanncaaagcnaagaagnnagcnnnnagcnnnnnagcnccnnaaaaaanccnnnccnnggcaaagaaggannanaagacngnnngggacnngnncacagcaagcgcnccagnaaccacggncccnnnaaagncngngnnggcngngcnnaagcgngnncnggaaccnnccaaacacanaggacnnnancgngnnnannncananacccacanggnncngccngaaangcaaccaanncaacaccnaagcagacnnaccaccnnccgagccaacccangnnnggccgannganccnacacngccaaanccncaaacaagcnganngancccnnnncncnnaaacngccngaannngcagccnggcanccnnngcnacnnnaacnncnngggnngncnancnggcnacncaagcgccngnggncnaaacgccaacagnnngnnggacanacnnnaanccccaaacngaagggcgaaggcgananannanngaancnaggnaccggncacanaacaanccagcccccngcngananaaaccgncccaaaccccgncaanncgnnnngccggnnncna

SEQ ID NO: 393 - DNA, 937 bp, Artificial Sequence
  Description of Artificial Sequence: Note = Synthetic Construct
  misc_feature (8)..(8): n is a, c, g, or t
  misc_feature (26)..(26): n is a, c, g, or t
  misc_feature (84)..(84): n is a, c, g, or t
  misc_feature (208)..(208): n is a, c, g, or t
  misc_feature (212)..(212): n is a, c, g, or t
  misc_feature (227)..(227): n is a, c, g, or t
  misc_feature (233)..(233): n is a, c, g, or t
  misc_feature (266)..(266): n is a, c, g, or t
  misc_feature (400)..(400): n is a, c, g, or t
  misc_feature (427)..(427): n is a, c, g, or t
  misc_feature (469)..(469): n is a, c, g, or t
  misc_feature (496)..(496): n is a, c, g, or t
  misc_feature (499)..(499): n is a, c, g, or t
  misc_feature (508)..(508): n is a, c, g, or t
  misc_feature (510)..(510): n is a, c, g, or t
  misc_feature (521)..(521): n is a, c, g, or t
  misc_feature (528)..(528): n is a, c, g, or t
  misc_feature (534)..(534): n is a, c, g, or t
  misc_feature (536)..(537): n is a, c, g, or t
  misc_feature (547)..(547): n is a, c, g, or t
  misc_feature (579)..(579): n is a, c, g, or t
  misc_feature (595)..(595): n is a, c, g, or t
  misc_feature (638)..(638): n is a, c, g, or t
  misc_feature (647)..(647): n is a, c, g, or t
  misc_feature (652)..(652): n is a, c, g, or t
  misc_feature (672)..(672): n is a, c, g, or t
  misc_feature (682)..(682): n is a, c, g, or t
  misc_feature (693)..(693): n is a, c, g, or t
  misc_feature (695)..(695): n is a, c, g, or t
  misc_feature (698)..(698): n is a, c, g, or t
  misc_feature (712)..(712): n is a, c, g, or t
  misc_feature (715)..(715): n is a, c, g, or t
  misc_feature (738)..(738): n is a, c, g, or t
  misc_feature (743)..(743): n is a, c, g, or t
  misc_feature (748)..(748): n is a, c, g, or t
  misc_feature (768)..(768): n is a, c, g, or t
  misc_feature (770)..(770): n is a, c, g, or t
  misc_feature (779)..(779): n is a, c, g, or t
  misc_feature (781)..(781): n is a, c, g, or t
  misc_feature (786)..(786): n is a, c, g, or t
  misc_feature (791)..(791): n is a, c, g, or t
  misc_feature (795)..(795): n is a, c, g, or t
  misc_feature (800)..(800): n is a, c, g, or t
  misc_feature (809)..(809): n is a, c, g, or t
  misc_feature (832)..(832): n is a, c, g, or t
  misc_feature (849)..(849): n is a, c, g, or t
  misc_feature (856)..(857): n is a, c, g, or t
  misc_feature (862)..(862): n is a, c, g, or t
  misc_feature (873)..(873): n is a, c, g, or t
  misc_feature (883)..(883): n is a, c, g, or t
  misc_feature (895)..(895): n is a, c, g, or t
  misc_feature (911)..(911): n is a, c, g, or t
  misc_feature (916)..(916): n is a, c, g, or t
  misc_feature (919)..(919): n is a, c, g, or t
  misc_feature (929)..(929): n is a, c, g, or t
  misc_feature (932)..(932): n is a, c, g, or t
caattccnttgaatctagccctccanaacctcttatttattttacaatgaaagttcgaatcccagtgtccccctgggagacaangttcctggagtatgtccatgggcagtggcaaagcagctgccactcttcctaggtctctctgtggcctctctctccaaggcacatgaaatttaccacagcatatgcatttccttttctttttganacanggtttctctgtgtanacttanctgtcctggaaccattctggagtttcttatcangccagcctccaactcgtggagatccacttgtctctgcttcctgagtgccaccacccctggcctggcatatacacagtcaattccaaaaaccgctttgctatcttggaactaatgaaaggtaaaagaaaagaacnctggttccatctggtgctgataatganggaaaaaaaccccggggaagaaccccttctgggggacaactnctttttaaaaaaaacatttcccccctncanaattttcantncctgctccaanggaaaantaaaantnnctgctttggnggaaaccaggatcaaaattttgcttttccttntttggcctagggtctnttttactcctaataaaaccgggtgcgggaacaaatgggaaganaatgctccnaaacngtctggggaaaggaacatcnggctcccccncccttttctgntntanaaaaatatgatttnggntcttccccctgggcctaaaagcnggggnttttnaagaatggagggcccgaacntngaaaacccncnttttnatggntggngaaanaaaattttnctggggggaattccaaaaagggnaaccctccttttctganccccgtnnccctngtttgttgggngttgttaaancaacccccgccngaaaaagaaatttttnaaacnaanccaattcttnttnttttt

SEQ ID NO: 394 - DNA, 974 bp, Artificial Sequence
  Description of Artificial Sequence: Note = Synthetic Construct
  misc_feature (26)..(26): n is a, c, g, or t
  misc_feature (28)..(28): n is a, c, g, or t
  misc_feature (31)..(31): n is a, c, g, or t
  misc_feature (36)..(37): n is a, c, g, or t
  misc_feature (39)..(39): n is a, c, g, or t
  misc_feature (52)..(52): n is a, c, g, or t
  misc_feature (96)..(96): n is a, c, g, or t
  misc_feature (186)..(186): n is a, c, g, or t
  misc_feature (208)..(208): n is a, c, g, or t
  misc_feature (221)..(221): n is a, c, g, or t
  misc_feature (301)..(301): n is a, c, g, or t
  misc_feature (332)..(332): n is a, c, g, or t
  misc_feature (349)..(349): n is a, c, g, or t
  misc_feature (371)..(371): n is a, c, g, or t
  misc_feature (377)..(377): n is a, c, g, or t
  misc_feature (399)..(399): n is a, c, g, or t
  misc_feature (403)..(403): n is a, c, g, or t
  misc_feature (451)..(451): n is a, c, g, or t
  misc_feature (530)..(530): n is a, c, g, or t
  misc_feature (532)..(532): n is a, c, g, or t
  misc_feature (592)..(592): n is a, c, g, or t
  misc_feature (621)..(621): n is a, c, g, or t
  misc_feature (628)..(628): n is a, c, g, or t
  misc_feature (641)..(641): n is a, c, g, or t
  misc_feature (656)..(656): n is a, c, g, or t
  misc_feature (676)..(676): n is a, c, g, or t
  misc_feature (686)..(686): n is a, c, g, or t
  misc_feature (714)..(714): n is a, c, g, or t
  misc_feature (721)..(721): n is a, c, g, or t
  misc_feature (733)..(733): n is a, c, g, or t
  misc_feature (745)..(745): n is a, c, g, or t
  misc_feature (749)..(749): n is a, c, g, or t
  misc_feature (751)..(751): n is a, c, g, or t
  misc_feature (756)..(756): n is a, c, g, or t
  misc_feature (759)..(759): n is a, c, g, or t
  misc_feature (770)..(770): n is a, c, g, or t
  misc_feature (783)..(783): n is a, c, g, or t
  misc_feature (789)..(789): n is a, c, g, or t
  misc_feature (806)..(806): n is a, c, g, or t
  misc_feature (827)..(827): n is a, c, g, or t
  misc_feature (832)..(832): n is a, c, g, or t
  misc_feature (835)..(835): n is a, c, g, or t
  misc_feature (841)..(841): n is a, c, g, or t
  misc_feature (849)..(850): n is a, c, g, or t
  misc_feature (864)..(864): n is a, c, g, or t
  misc_feature (870)..(870): n is a, c, g, or t
  misc_feature (874)..(874): n is a, c, g, or t
  misc_feature (878)..(878): n is a, c, g, or t
  misc_feature (887)..(887): n is a, c, g, or t
  misc_feature (910)..(910): n is a, c, g, or t
  misc_feature (914)..(914): n is a, c, g, or t
  misc_feature (917)..(917): n is a, c, g, or t
  misc_feature (919)..(919): n is a, c, g, or t
  misc_feature (933)..(934): n is a, c, g, or t
  misc_feature (945)..(945): n is a, c, g, or t
  misc_feature (947)..(947): n is a, c, g, or t
  misc_feature (958)..(958): n is a, c, g, or t
  misc_feature (962)..(962): n is a, c, g, or t
  misc_feature (964)..(964): n is a, c, g, or t
  misc_feature (967)..(967): n is a, c, g, or t
ccattccattgattcacttagtagcntngtngccgnncntagtaatatgtgntactgtctcggagatatacactaattttcatgaaatggcaatcnaggtttctagaaacaattcaccatgatacttggattccgttccttaaaatgttgctcgatattaaaaagcaaactcatacaagcatgtcncattgggaactcactgaattcnccatgatacttanagtccgttccttaaaatgttgttacatattgaaaagcacactcatacaagcatgtcccattgggaactcactgaattcangaaatttggaaacagcagtgcttccctcgangagaagagacaaacgantgtgagcctaatgcatggcaangcacanggcatgccggtacacagggcangaanacggaacaaaacaaaacatgacatgtgccttgtggtggaagccttgtnggcttcagccacaccaagggctgaagagaagacattaagttacccataacatggccacaaacatgttctgctatttcananataaactccattttcccagattccacacctgggcctggcttgctttgctgttaggaacantgtgactgacactgaacaaccccaggganactttcncagtcctgggaanccaaaaccatggaanaaatgctctgtctgtccaanaatccgcctnggcatatggaaggactttaaaaagcttngggtgcngggtacagggcnctcctaactctnctgncnttctnccntacttaggctntaaacaaaccaantaaacngcccatcctacccaatnaaaaaaaaaatctgtccccgntcctnccncccctncgaacccnnttcgaacctgtccnaccctnttcnaccnccccttttngaacctttccaaccctttcaaancccnctncnaacccccttttaannccttcaacccncnaaccctcgacncccncnttnacctcct

SEQ ID NO: 395 - DNA, 768 bp, Artificial Sequence
  Description of Artificial Sequence: Note = Synthetic Construct
  misc_feature (11)..(11): n is a, c, g, or t
  misc_feature (37)..(37): n is a, c, g, or t
  misc_feature (59)..(59): n is a, c, g, or t
  misc_feature (112)..(112): n is a, c, g, or t
  misc_feature (123)..(123): n is a, c, g, or t
  misc_feature (143)..(143): n is a, c, g, or t
  misc_feature (169)..(169): n is a, c, g, or t
  misc_feature (174)..(174): n is a, c, g, or t
  misc_feature (187)..(188): n is a, c, g, or t
  misc_feature (193)..(193): n is a, c, g, or t
  misc_feature (195)..(195): n is a, c, g, or t
  misc_feature (204)..(204): n is a, c, g, or t
  misc_feature (217)..(217): n is a, c, g, or t
  misc_feature (224)..(224): n is a, c, g, or t
  misc_feature (242)..(242): n is a, c, g, or t
  misc_feature (247)..(247): n is a, c, g, or t
  misc_feature (256)..(256): n is a, c, g, or t
  misc_feature (304)..(304): n is a, c, g, or t
  misc_feature (312)..(312): n is a, c, g, or t
  misc_feature (322)..(322): n is a, c, g, or t
  misc_feature (343)..(343): n is a, c, g, or t
  misc_feature (349)..(349): n is a, c, g, or t
  misc_feature (396)..(396): n is a, c, g, or t
  misc_feature (419)..(420): n is a, c, g, or t
  misc_feature (428)..(428): n is a, c, g, or t
  misc_feature (436)..(436): n is a, c, g, or t
  misc_feature (438)..(439): n is a, c, g, or t
  misc_feature (442)..(442): n is a, c, g, or t
  misc_feature (451)..(452): n is a, c, g, or t
  misc_feature (461)..(461): n is a, c, g, or t
  misc_feature (472)..(472): n is a, c, g, or t
  misc_feature (477)..(477): n is a, c, g, or t
  misc_feature (484)..(484): n is a, c, g, or t
  misc_feature (499)..(499): n is a, c, g, or t
  misc_feature (508)..(508): n is a, c, g, or t
  misc_feature (515)..(515): n is a, c, g, or t
  misc_feature (520)..(520): n is a, c, g, or t
  misc_feature (530)..(530): n is a, c, g, or t
  misc_feature (536)..(536): n is a, c, g, or t
  misc_feature (541)..(541): n is a, c, g, or t
  misc_feature (545)..(545): n is a, c, g, or t
  misc_feature (548)..(548): n is a, c, g, or t
  misc_feature (551)..(551): n is a, c, g, or t
  misc_feature (554)..(554): n is a, c, g, or t
  misc_feature (561)..(561): n is a, c, g, or t
  misc_feature (574)..(574): n is a, c, g, or t
  misc_feature (582)..(583): n is a, c, g, or t
  misc_feature (585)..(585): n is a, c, g, or t
  misc_feature (590)..(590): n is a, c, g, or t
  misc_feature (603)..(603): n is a, c, g, or t
  misc_feature (609)..(609): n is a, c, g, or t
  misc_feature (612)..(612): n is a, c, g, or t
  misc_feature (616)..(617): n is a, c, g, or t
  misc_feature (635)..(635): n is a, c, g, or t
  misc_feature (638)..(638): n is a, c, g, or t
  misc_feature (641)..(641): n is a, c, g, or t
  misc_feature (654)..(654): n is a, c, g, or t
  misc_feature (658)..(658): n is a, c, g, or t
  misc_feature (660)..(661): n is a, c, g, or t
  misc_feature (667)..(667): n is a, c, g, or t
  misc_feature (673)..(673): n is a, c, g, or t
  misc_feature (680)..(682): n is a, c, g, or t
  misc_feature (684)..(685): n is a, c, g, or t
  misc_feature (687)..(687): n is a, c, g, or t
  misc_feature (689)..(689): n is a, c, g, or t
  misc_feature (693)..(693): n is a, c, g, or t
  misc_feature (714)..(714): n is a, c, g, or t
  misc_feature (720)..(721): n is a, c, g, or t
  misc_feature (726)..(726): n is a, c, g, or t
  misc_feature (728)..(728): n is a, c, g, or t
  misc_feature (746)..(746): n is a, c, g, or t
  misc_feature (762)..(762): n is a, c, g, or t
  misc_feature (764)..(764): n is a, c, g, or t
tcccagcatantcatttcttccccaagtacatctatnaatatcgtacagaaagcacggnttaggtaatgatgcttttaggtcctaggattgactatgaaattcaggttatanttaactccttnactcagggttagggtgttcngaaactgctggaaacaactagttaantactnaaaaactcagatnncctgnantgtgagatnaaaataaggcctnaaggtgngaaagaaaacgggaaatncaganacagttcantgaaacacaagaggaatgaatcattaagacagggttgaggacacgtgncggttttnagcgtgttanttcccgtcctctactctttanaaatcncagggggcactaggctgccggactcggtctgacttccaatctggccntcgatctttcagttgctaggggnnaacgcagnatacggcngnntgntctctctcnnaacccccancccatttacanaccgntggcttnaacctggaatcaggncccgcaggncctgagngtggntactgggtantggtanaaggnaccnctnaanccntaccaangggtaatcgtccnagtcaatnncncgtgnctaattaagccgnttcagntantgcnnaatgaactggccccctangtnggnaagaaaggttganccangnntcggtnggttantgagggnnngnngncnaacncgttaaaggtcaacctcccanttgacnngtttncncttgtttttggccccaantttttccaaatgctananatgt

SEQ ID NO: 396 - DNA, 911 bp, Artificial Sequence
  Description of Artificial Sequence: Note = Synthetic Construct
  misc_feature (16)..(16): n is a, c, g, or t
  misc_feature (26)..(27): n is a, c, g, or t
  misc_feature (46)..(47): n is a, c, g, or t
  misc_feature (55)..(55): n is a, c, g, or t
  misc_feature (65)..(65): n is a, c, g, or t
  misc_feature (75)..(75): n is a, c, g, or t
  misc_feature (78)..(78): n is a, c, g, or t
  misc_feature (89)..(89): n is a, c, g, or t
  misc_feature (96)..(96): n is a, c, g, or t
  misc_feature (103)..(103): n is a, c, g, or t
  misc_feature (105)..(105): n is a, c, g, or t
  misc_feature (109)..(110): n is a, c, g, or t
  misc_feature (119)..(119): n is a, c, g, or t
  misc_feature (128)..(128): n is a, c, g, or t
  misc_feature (131)..(131): n is a, c, g, or t
  misc_feature (133)..(133): n is a, c, g, or t
  misc_feature (135)..(135): n is a, c, g, or t
  misc_feature (137)..(137): n is a, c, g, or t
  misc_feature (160)..(160): n is a, c, g, or t
  misc_feature (162)..(162): n is a, c, g, or t
  misc_feature (179)..(179): n is a, c, g, or t
  misc_feature (183)..(183): n is a, c, g, or t
  misc_feature (192)..(192): n is a, c, g, or t
  misc_feature (204)..(204): n is a, c, g, or t
  misc_feature (210)..(210): n is a, c, g, or t
  misc_feature (223)..(223): n is a, c, g, or t
  misc_feature (225)..(225): n is a, c, g, or t
  misc_feature (240)..(240): n is a, c, g, or t
  misc_feature (249)..(249): n is a, c, g, or t
  misc_feature (251)..(251): n is a, c, g, or t
  misc_feature (268)..(268): n is a, c, g, or t
  misc_feature (281)..(281): n is a, c, g, or t
  misc_feature (286)..(286): n is a, c, g, or t
  misc_feature (291)..(291): n is a, c, g, or t
  misc_feature (301)..(302): n is a, c, g, or t
  misc_feature (308)..(308): n is a, c, g, or t
  misc_feature (312)..(312): n is a, c, g, or t
  misc_feature (321)..(321): n is a, c, g, or t
  misc_feature (332)..(332): n is a, c, g, or t
  misc_feature (338)..(338): n is a, c, g, or t
  misc_feature (340)..(340): n is a, c, g, or t
  misc_feature (351)..(351): n is a, c, g, or t
  misc_feature (410)..(410): n is a, c, g, or t
  misc_feature (419)..(419): n is a, c, g, or t
  misc_feature (431)..(431): n is a, c, g, or t
  misc_feature (439)..(439): n is a, c, g, or t
  misc_feature (446)..(446): n is a, c, g, or t
  misc_feature (448)..(448): n is a, c, g, or t
  misc_feature (474)..(474): n is a, c, g, or t
  misc_feature (480)..(480): n is a, c, g, or t
  misc_feature (486)..(486): n is a, c, g, or t
  misc_feature (493)..(494): n is a, c, g, or t
  misc_feature (505)..(505): n is a, c, g, or t
  misc_feature (509)..(509): n is a, c, g, or t
  misc_feature (512)..(512): n is a, c, g, or t
  misc_feature (529)..(529): n is a, c, g, or t
  misc_feature (536)..(536): n is a, c, g, or t
  misc_feature (538)..(538): n is a, c, g, or t
  misc_feature (540)..(540): n is a, c, g, or t
  misc_feature (562)..(562): n is a, c, g, or t
  misc_feature (571)..(571): n is a, c, g, or t
  misc_feature (588)..(588): n is a, c, g, or t
  misc_feature (597)..(597): n is a, c, g, or t
  misc_feature (605)..(605): n is a, c, g, or t
  misc_feature (609)..(610): n is a, c, g, or t
  misc_feature (613)..(614): n is a, c, g, or t
  misc_feature (621)..(621): n is a, c, g, or t
  misc_feature (624)..(624): n is a, c, g, or t
  misc_feature (635)..(635): n is a, c, g, or t
  misc_feature (644)..(646): n is a, c, g, or t
  misc_feature (651)..(652): n is a, c, g, or t
  misc_feature (656)..(656): n is a, c, g, or t
  misc_feature (674)..(674): n is a, c, g, or t
  misc_feature (679)..(679): n is a, c, g, or t
  misc_feature (682)..(682): n is a, c, g, or t
  misc_feature (687)..(687): n is a, c, g, or t
  misc_feature (689)..(689): n is a, c, g, or t
  misc_feature (698)..(698): n is a, c, g, or t
  misc_feature (706)..(706): n is a, c, g, or t
  misc_feature (717)..(717): n is a, c, g, or t
  misc_feature (729)..(729): n is a, c, g, or t
  misc_feature (748)..(748): n is a, c, g, or t
  misc_feature (756)..(756): n is a, c, g, or t
  misc_feature (767)..(767): n is a, c, g, or t
  misc_feature (769)..(769): n is a, c, g, or t
  misc_feature (773)..(773): n is a, c, g, or t
  misc_feature (775)..(775): n is a, c, g, or t
  misc_feature (779)..(779): n is a, c, g, or t
  misc_feature (789)..(789): n is a, c, g, or t
  misc_feature (795)..(795): n is a, c, g, or t
  misc_feature (800)..(801): n is a, c, g, or t
  misc_feature (813)..(813): n is a, c, g, or t
  misc_feature (823)..(823): n is a, c, g, or t
  misc_feature (825)..(825): n is a, c, g, or t
  misc_feature (830)..(830): n is a, c, g, or t
  misc_feature (839)..(839): n is a, c, g, or t
  misc_feature (849)..(849): n is a, c, g, or t
  misc_feature (857)..(857): n is a, c, g, or t
  misc_feature (866)..(866): n is a, c, g, or t
  misc_feature (877)..(877): n is a, c, g, or t
  misc_feature (880)..(880): n is a, c, g, or t
  misc_feature (886)..(886): n is a, c, g, or t
  misc_feature (897)..(898): n is a, c, g, or t
  misc_feature (902)..(902): n is a, c, g, or t
  misc_feature (906)..(906): n is a, c, g, or t
cattcattgaatcatnatcccattannaagctcttgtatatgcctnnttctcaanatttatcaanatttggtgtnccnaatctgattancctggtnaattccnanttcnncactacatngcgtccgcnttntntntntcctataaaggatcatggattcntngcctgatttatcccacntcancctccccanccaccccctatnaaaatntccctgtgctacncnggaaacaaataaccnatgaaggancngtgaattgggagggaanctctcttgaactntttcnatctnaggttttaannactctntgcntactttcgntaaacaaacanctcaananaaagctctccngcattcactatcttcccaccctctgcccctgctgggcgtggtaagctgcctgggaactnggacctggngaaatatggcangaaggtgnggccagntnggactcgagtctcacctcctaatcanactgcngctctnaggaccnncgtgtggtcgnctcnctnaaatacgcacataggtngggtgantntnggcacccccccccccatcagantcccctctngcctttgcccccggggngttccactnccacaacncctnntcnngggtgtnccncccccaccccncaaaggtcnnngtccnnaacncaacttcggtttttttgnccccnccntgctncntagtcttgnacccggcnacagagagatntgaaacctctcnaaaaatttcagtcccaaanttaccccntgtaaacacangngggnangggnggcaacttangtttcntcctnntcaaaattcttnttcgtttaantnccccnttttcttanttttcctccnacaaaatntaccattantccccttgttnganatgccnctaaattattnncctncctnttttt

SEQ ID NO: 397 - DNA, 961 bp, Artificial Sequence
  Description of Artificial Sequence: Note = Synthetic Construct
  misc_feature (6)..(6): n is a, c, g, or t
  misc_feature (29)..(29): n is a, c, g, or t
  misc_feature (112)..(112): n is a, c, g, or t
  misc_feature (143)..(143): n is a, c, g, or t
  misc_feature (158)..(158): n is a, c, g, or t
  misc_feature (217)..(217): n is a, c, g, or t
  misc_feature (233)..(233): n is a, c, g, or t
  misc_feature (248)..(248): n is a, c, g, or t
  misc_feature (259)..(260): n is a, c, g, or t
  misc_feature (339)..(339): n is a, c, g, or t
  misc_feature (363)..(363): n is a, c, g, or t
  misc_feature (371)..(371): n is a, c, g, or t
  misc_feature (379)..(379): n is a, c, g, or t
  misc_feature (480)..(480): n is a, c, g, or t
  misc_feature (527)..(527): n is a, c, g, or t
  misc_feature (565)..(565): n is a, c, g, or t
  misc_feature (598)..(598): n is a, c, g, or t
  misc_feature (605)..(605): n is a, c, g, or t
  misc_feature (607)..(607): n is a, c, g, or t
  misc_feature (612)..(612): n is a, c, g, or t
  misc_feature (616)..(617): n is a, c, g, or t
  misc_feature (619)..(619): n is a, c, g, or t
  misc_feature (646)..(646): n is a, c, g, or t
  misc_feature (661)..(661): n is a, c, g, or t
  misc_feature (666)..(666): n is a, c, g, or t
  misc_feature (670)..(670): n is a, c, g, or t
  misc_feature (672)..(672): n is a, c, g, or t
  misc_feature (716)..(716): n is a, c, g, or t
  misc_feature (727)..(727): n is a, c, g, or t
  misc_feature (732)..(732): n is a, c, g, or t
  misc_feature (735)..(735): n is a, c, g, or t
  misc_feature (742)..(742): n is a, c, g, or t
  misc_feature (758)..(758): n is a, c, g, or t
  misc_feature (764)..(764): n is a, c, g, or t
  misc_feature (769)..(770): n is a, c, g, or t
  misc_feature (781)..(781): n is a, c, g, or t
  misc_feature (786)..(786): n is a, c, g, or t
  misc_feature (800)..(800): n is a, c, g, or t
  misc_feature (814)..(814): n is a, c, g, or t
  misc_feature (827)..(827): n is a, c, g, or t
  misc_feature (830)..(830): n is a, c, g, or t
  misc_feature (845)..(845): n is a, c, g, or t
  misc_feature (848)..(848): n is a, c, g, or t
  misc_feature (855)..(855): n is a, c, g, or t
  misc_feature (858)..(858): n is a, c, g, or t
  misc_feature (861)..(862): n is a, c, g, or t
  misc_feature (876)..(876): n is a, c, g, or t
  misc_feature (893)..(893): n is a, c, g, or t
  misc_feature (899)..(899): n is a, c, g, or t
  misc_feature (901)..(901): n is a, c, g, or t
  misc_feature (910)..(910): n is a, c, g, or t
  misc_feature (912)..(912): n is a, c, g, or t
  misc_feature (914)..(915): n is a, c, g, or t
  misc_feature (920)..(921): n is a, c, g, or t
  misc_feature (924)..(924): n is a, c, g, or t
  misc_feature (934)..(934): n is a, c, g, or t
  misc_feature (944)..(945): n is a, c, g, or t
  misc_feature (949)..(951): n is a, c, g, or t
  misc_feature (959)..(960): n is a, c, g, or t
cattcnattgaatcatatgtgcccaatangatcgcatgtaataagcttgttattcaagatagagcaacgttttaagggaacggaaacactgtttctctgtgaattctcttcntttccactgggaatctattgttgcagacgtngttttctttatatangcagggaaagtgttcgcaaatggagctgcactttctaagcaaattctcttcgttcctancgggattcacttgttngaagcatagatttcnagatatacgtnngggaaattttcgcgattggaactgcactttttcagtgaattttcttcattccaagcgcgactctattgtagcaggcgtncttttcaagatatatgcagtgcangttttcangaaatganctgcattttctaagcgaattcgctttggaagctgaacttgactcactgaaatcctcctgcctctgcctcctgaatgctcggattataggcatgaaccccanggtttgggtgaattgtcttggtggttttgtattaaggcaggtctcantattcaggctgggctcaaactactgtgtccccaggatnacttgaaattcgaactggctccctctccaacantgaggtncnggatngganncnccctgtcctgcaccactctggggaacnaaccagggttccggnccttnggantnccttcaactgaactactacatctccccctggccataatccatcnggggctgaatnttcantcnccgcccncccaaatgcggaatanggtttncctcnnccactcctgtntgatntgaggaaaatggcnattctgttttcccnttttttcaaaccnctnctgtaaaaccttccnaanatatggnggnttnnaaccgatccccttngtttttatggaacttcnctctancncttatcagncntnncccgnnggntaaaaagtcnttttcttttnntttnnnaatttcgnnc

SEQ ID NO: 398 - DNA, 964 bp, Artificial Sequence
  Description of Artificial Sequence: Note = Synthetic Construct
  misc_feature (4)..(5): n is a, c, g, or t
  misc_feature (11)..(12): n is a, c, g, or t
  misc_feature (15)..(15): n is a, c, g, or t
  misc_feature (18)..(18): n is a, c, g, or t
  misc_feature (26)..(26): n is a, c, g, or t
  misc_feature (30)..(30): n is a, c, g, or t
  misc_feature (33)..(35): n is a, c, g, or t
  misc_feature (40)..(40): n is a, c, g, or t
  misc_feature (48)..(49): n is a, c, g, or t
  misc_feature (54)..(54): n is a, c, g, or t
  misc_feature (63)..(63): n is a, c, g, or t
  misc_feature (65)..(68): n is a, c, g, or t
  misc_feature (73)..(73): n is a, c, g, or t
  misc_feature (77)..(78): n is a, c, g, or t
  misc_feature (81)..(81): n is a, c, g, or t
  misc_feature (84)..(84): n is a, c, g, or t
  misc_feature (89)..(91): n is a, c, g, or t
  misc_feature (95)..(95): n is a, c, g, or t
  misc_feature (98)..(99): n is a, c, g, or t
  misc_feature (102)..(102): n is a, c, g, or t
  misc_feature (104)..(104): n is a, c, g, or t
  misc_feature (106)..(106): n is a, c, g, or t
  misc_feature (110)..(110): n is a, c, g, or t
  misc_feature (118)..(118): n is a, c, g, or t
  misc_feature (122)..(122): n is a, c, g, or t
  misc_feature (128)..(128): n is a, c, g, or t
  misc_feature (132)..(135): n is a, c, g, or t
  misc_feature (138)..(138): n is a, c, g, or t
  misc_feature (144)..(144): n is a, c, g, or t
  misc_feature (146)..(146): n is a, c, g, or t
  misc_feature (151)..(153): n is a, c, g, or t
  misc_feature (158)..(159): n is a, c, g, or t
  misc_feature (165)..(166): n is a, c, g, or t
  misc_feature (168)..(168): n is a, c, g, or t
  misc_feature (170)..(170): n is a, c, g, or t
  misc_feature (174)..(175): n is a, c, g, or t
  misc_feature (183)..(190): n is a, c, g, or t
  misc_feature (192)..(192): n is a, c, g, or t
  misc_feature (205)..(205): n is a, c, g, or t
  misc_feature (211)..(211): n is a, c, g, or t
  misc_feature (215)..(215): n is a, c, g, or t
  misc_feature (217)..(218): n is a, c, g, or t
  misc_feature (220)..(220): n is a, c, g, or t
  misc_feature (224)..(226): n is a, c, g, or t
  misc_feature (229)..(229): n is a, c, g, or t
  misc_feature (231)..(231): n is a, c, g, or t
  misc_feature (233)..(233): n is a, c, g, or t
  misc_feature (242)..(242): n is a, c, g, or t
  misc_feature (244)..(244): n is a, c, g, or t
  misc_feature (246)..(247): n is a, c, g, or t
  misc_feature (259)..(260): n is a, c, g, or t
  misc_feature (262)..(262): n is a, c, g, or t
  misc_feature (264)..(266): n is a, c, g, or t
  misc_feature (269)..(269): n is a, c, g, or t
  misc_feature (273)..(273): n is a, c, g, or t
  misc_feature (276)..(276): n is a, c, g, or t
  misc_feature (278)..(278): n is a, c, g, or t
  misc_feature (286)..(286): n is a, c, g, or t
  misc_feature (288)..(288): n is a, c, g, or t
  misc_feature (291)..(291): n is a, c, g, or t
  misc_feature (293)..(293): n is a, c, g, or t
  misc_feature (295)..(297): n is a, c, g, or t
  misc_feature (302)..(302): n is a, c, g, or t
  misc_feature (304)..(304): n is a, c, g, or t
  misc_feature (307)..(307): n is a, c, g, or t
  misc_feature (309)..(310): n is a, c, g, or t
  misc_feature (312)..(312): n is a, c, g, or t
  misc_feature (314)..(314): n is a, c, g, or t
  misc_feature (316)..(316): n is a, c, g, or t
  misc_feature (318)..(320): n is a, c, g, or t
  misc_feature (324)..(324): n is a, c, g, or t
  misc_feature (326)..(326): n is a, c, g, or t
  misc_feature (328)..(328): n is a, c, g, or t
  misc_feature (330)..(330): n is a, c, g, or t
  misc_feature (335)..(338): n is a, c, g, or t
  misc_feature (340)..(340): n is a, c, g, or t
  misc_feature (343)..(343): n is a, c, g, or t
  misc_feature (348)..(348): n is a, c, g, or t
  misc_feature (351)..(353): n is a, c, g, or t
  misc_feature (358)..(358): n is a, c, g, or t
  misc_feature (362)..(362): n is a, c, g, or t
  misc_feature (366)..(366): n is a, c, g, or t
  misc_feature (381)..(381): n is a, c, g, or t
  misc_feature (383)..(383): n is a, c, g, or t
  misc_feature (388)..(388): n is a, c, g, or t
  misc_feature (390)..(390): n is a, c, g, or t
  misc_feature (392)..(392): n is a, c, g, or t
  misc_feature (397)..(397): n is a, c, g, or t
  misc_feature (403)..(403): n is a, c, g, or t
  misc_feature (413)..(413): n is a, c, g, or t
  misc_feature (415)..(415): n is a, c, g, or t
  misc_feature (417)..(417): n is a, c, g, or t
  misc_feature (419)..(420): n is a, c, g, or t
  misc_feature (423)..(423): n is a, c, g, or t
  misc_feature (426)..(426): n is a, c, g, or t
  misc_feature (428)..(428): n is a, c, g, or t
  misc_feature (432)..(432): n is a, c, g, or t
  misc_feature (436)..(436): n is a, c, g, or t
  misc_feature (441)..(444): n is a, c, g, or t
  misc_feature (448)..(448): n is a, c, g, or t
  misc_feature (452)..(452): n is a, c, g, or t
  misc_feature (455)..(455): n is a, c, g, or t
  misc_feature (459)..(459): n is a, c, g, or t
  misc_feature (463)..(463): n is a, c, g, or t
  misc_feature (466)..(466): n is a, c, g, or t
  misc_feature (470)..(470): n is a, c, g, or t
  misc_feature (472)..(472): n is a, c, g, or t
  misc_feature (476)..(476): n is a, c, g, or t
  misc_feature (479)..(479): n is a, c, g, or t
  misc_feature (483)..(483): n is a, c, g, or t
  misc_feature (486)..(486): n is a, c, g, or t
  misc_feature (488)..(488): n is a, c, g, or t
  misc_feature (491)..(491): n is a, c, g, or t
  misc_feature (493)..(493): n is a, c, g, or t
  misc_feature (495)..(495): n is a, c, g, or t
  misc_feature (498)..(498): n is a, c, g, or t
  misc_feature (504)..(505): n is a, c, g, or t
  misc_feature (508)..(508): n is a, c, g, or t
  misc_feature (513)..(513): n is a, c, g, or t
  misc_feature (520)..(521): n is a, c, g, or t
  misc_feature (523)..(523): n is a, c, g, or t
  misc_feature (526)..(526): n is a, c, g, or t
  misc_feature (531)..(531): n is a, c, g, or t
  misc_feature (533)..(536): n is a, c, g, or t
  misc_feature (538)..(538): n is a, c, g, or t
  misc_feature (541)..(541): n is a, c, g, or t
  misc_feature (547)..(547): n is a, c, g, or t
  misc_feature (553)..(553): n is a, c, g, or t
  misc_feature (555)..(556): n is a, c, g, or t
  misc_feature (558)..(558): n is a, c, g, or t
  misc_feature (565)..(565): n is a, c, g, or t
  misc_feature (568)..(570): n is a, c, g, or t
  misc_feature (572)..(573): n is a, c, g, or t
  misc_feature (578)..(578): n is a, c, g, or t
  misc_feature (582)..(584): n is a, c, g, or t
  misc_feature (590)..(592): n is a, c, g, or t
  misc_feature (597)..(597): n is a, c, g, or t
  misc_feature (599)..(599): n is a, c, g, or t
  misc_feature (601)..(603): n is a, c, g, or t
  misc_feature (607)..(608): n is a, c, g, or t
  misc_feature (615)..(615): n is a, c, g, or t
  misc_feature (617)..(617): n is a, c, g, or t
  misc_feature (619)..(619): n is a, c, g, or t
  misc_feature (621)..(621): n is a, c, g, or t
  misc_feature (624)..(624): n is a, c, g, or t
  misc_feature (626)..(626): n is a, c, g, or t
  misc_feature (635)..(639): n is a, c, g, or t
  misc_feature (642)..(642): n is a, c, g, or t
  misc_feature (644)..(646): n is a, c, g, or t
  misc_feature (648)..(648): n is a, c, g, or t
  misc_feature (650)..(650): n is a, c, g, or t
  misc_feature (660)..(660): n is a, c, g, or t
  misc_feature (662)..(662): n is a, c, g, or t
  misc_feature (665)..(666): n is a, c, g, or t
  misc_feature (669)..(669): n is a, c, g, or t
  misc_feature (672)..(673): n is a, c, g, or t
  misc_feature (675)..(675): n is a, c, g, or t
  misc_feature (679)..(679): n is a, c, g, or t
  misc_feature (681)..(681): n is a, c, g, or t
  misc_feature (683)..(683): n is a, c, g, or t
  misc_feature (685)..(685): n is a, c, g, or t
  misc_feature (695)..(697): n is a, c, g, or t
  misc_feature (701)..(701): n is a, c, g, or t
  misc_feature (706)..(706): n is a, c, g, or t
  misc_feature (710)..(711): n is a, c, g, or t
  misc_feature (714)..(714): n is a, c, g, or t
  misc_feature (716)..(716): n is a, c, g, or t
  misc_feature (719)..(719): n is a, c, g, or t
  misc_feature (725)..(725): n is a, c, g, or t
  misc_feature (729)..(732): n is a, c, g, or t
  misc_feature (738)..(738): n is a, c, g, or t
  misc_feature (743)..(743): n is a, c, g, or t
  misc_feature (749)..(749): n is a, c, g, or t
  misc_feature (754)..(754): n is a, c, g, or t
  misc_feature (758)..(759): n is a, c, g, or t
  misc_feature (766)..(767): n is a, c, g, or t
  misc_feature (769)..(769): n is a, c, g, or t
  misc_feature (772)..(772): n is a, c, g, or t
  misc_feature (776)..(776): n is a, c, g, or t
  misc_feature (781)..(781): n is a, c, g, or t
  misc_feature (784)..(784): n is a, c, g, or t
  misc_feature (787)..(787): n is a, c, g, or t
  misc_feature (791)..(792): n is a, c, g, or t
  misc_feature (794)..(794): n is a, c, g, or t
  misc_feature (796)..(797): n is a, c, g, or t
  misc_feature (800)..(800): n is a, c, g, or t
  misc_feature (802)..(803): n is a, c, g, or t
  misc_feature (807)..(809): n is a, c, g, or t
  misc_feature (812)..(812): n is a, c, g, or t
  misc_feature (819)..(821): n is a, c, g, or t
  misc_feature (827)..(828): n is a, c, g, or t
  misc_feature (837)..(837): n is a, c, g, or t
  misc_feature (839)..(839): n is a, c, g, or t
  misc_feature (841)..(841): n is a, c, g, or t
  misc_feature (844)..(845): n is a, c, g, or t
  misc_feature (850)..(850): n is a, c, g, or t
  misc_feature (854)..(854): n is a, c, g, or t
  misc_feature (859)..(860): n is a, c, g, or t
  misc_feature (863)..(864): n is a, c, g, or t
  misc_feature (867)..(871): n is a, c, g, or t
  misc_feature (877)..(877): n is a, c, g, or t
  misc_feature (880)..(882): n is a, c, g, or t
  misc_feature (884)..(884): n is a, c, g, or t
  misc_feature (890)..(894): n is a, c, g, or t
  misc_feature (898)..(898): n is a, c, g, or t
  misc_feature (900)..(900): n is a, c, g, or t
  misc_feature (902)..(904): n is a, c, g, or t
  misc_feature (906)..(906): n is a, c, g, or t
  misc_feature (909)..(917): n is a, c, g, or t
  misc_feature (919)..(919): n is a, c, g, or t
  misc_feature (923)..(923): n is a, c, g, or t
  misc_feature (925)..(926): n is a, c, g, or t
  misc_feature (928)..(931): n is a, c, g, or t
  misc_feature (933)..(934): n is a, c, g, or t
  misc_feature (936)..(936): n is a, c, g, or t
  misc_feature (938)..(938): n is a, c, g, or t
  misc_feature (942)..(942): n is a, c, g, or t
  misc_feature (946)..(946): n is a, c, g, or t
  misc_feature (949)..(950): n is a, c, g, or t
  misc_feature (955)..(957): n is a, c, g, or t
  misc_feature (961)..(961): n is a, c, g, or t
caannccacannaancanacgaaacnaccngannngacgnggacaaanngaganggggggaancnnnnaacanagcnnacnagngaaannnaacncannccngncngcancggcaaanagcnaaacgngccnnnngangccagngnagagnnngaaanncacccnnancngccnnccaaacgnnnnnnnnangagaacaacgaangacgcncacngnncnggannngancncngagaaacgnancnncaagccaccccnngncnnnccngganagncngacggcgnanaangnannncacancncancnncncncncnnnccananancnggccnnnngnccncacanggnnnccggnaccnaccnagccaagaagaaggngncgganancnacggncccgcnaccagcaaancncncnnccncanancgancagnaaccnnnnccgnggcncgncacngccngancacncngaancgnagangancncgncncnaanacccanncgncgganccgcacnnancanaggancnnnncncgnacgcancggaanannangaggccnagnnncnncgccngggnnnccagannnccggnancnnngggnnaacagancngncngancncacgcagcnnnnnccncnnncncnaagggccccngnccnnagnaannanaaancncngnccccaacacnnngccnaaggnccgnnacngnganggccgncggnnnnaccagnagganagcccnggagnacgnnaggaccnncnggnccgnagagngancgngaannangnnccncnnaagnnnccngaaaaannnggcgannccaccccgncnanggnnccaancacnacacnncgnnacnnnnncggaanggnnncnggcccnnnnncccncngnnncncgnnnnnnnnngngccncnncnnnngnncncncccncggngcnncggannncccncca

SEQ ID NO: 399 - DNA, 904 bp, Artificial Sequence
  Description of Artificial Sequence: Note = Synthetic Construct
  misc_feature (27)..(27): n is a, c, g, or t
  misc_feature (152)..(152): n is a, c, g, or t
  misc_feature (210)..(210): n is a, c, g, or t
  misc_feature (279)..(279): n is a, c, g, or t
  misc_feature (291)..(291): n is a, c, g, or t
  misc_feature (293)..(293): n is a, c, g, or t
  misc_feature (324)..(324): n is a, c, g, or t
  misc_feature (379)..(379): n is a, c, g, or t
  misc_feature (435)..(435): n is a, c, g, or t
  misc_feature (438)..(438): n is a, c, g, or t
  misc_feature (440)..(440): n is a, c, g, or t
  misc_feature (479)..(479): n is a, c, g, or t
  misc_feature (482)..(482): n is a, c, g, or t
  misc_feature (500)..(500): n is a, c, g, or t
  misc_feature (514)..(514): n is a, c, g, or t
  misc_feature (552)..(552): n is a, c, g, or t
  misc_feature (564)..(564): n is a, c, g, or t
  misc_feature (566)..(566): n is a, c, g, or t
  misc_feature (577)..(577): n is a, c, g, or t
  misc_feature (587)..(587): n is a, c, g, or t
  misc_feature (589)..(589): n is a, c, g, or t
  misc_feature (617)..(617): n is a, c, g, or t
  misc_feature (628)..(628): n is a, c, g, or t
  misc_feature (630)..(630): n is a, c, g, or t
  misc_feature (636)..(636): n is a, c, g, or t
  misc_feature (665)..(665): n is a, c, g, or t
  misc_feature (696)..(696): n is a, c, g, or t
  misc_feature (716)..(716): n is a, c, g, or t
  misc_feature (727)..(727): n is a, c, g, or t
  misc_feature (730)..(730): n is a, c, g, or t
  misc_feature (737)..(737): n is a, c, g, or t
  misc_feature (743)..(743): n is a, c, g, or t
  misc_feature (749)..(749): n is a, c, g, or t
  misc_feature (753)..(753): n is a, c, g, or t
  misc_feature (767)..(767): n is a, c, g, or t
  misc_feature (780)..(780): n is a, c, g, or t
  misc_feature (791)..(791): n is a, c, g, or t
  misc_feature (804)..(804): n is a, c, g, or t
  misc_feature (811)..(811): n is a, c, g, or t
  misc_feature (814)..(814): n is a, c, g, or t
  misc_feature (826)..(826): n is a, c, g, or t
  misc_feature (838)..(840): n is a, c, g, or t
  misc_feature (847)..(847): n is a, c, g, or t
  misc_feature (849)..(850): n is a, c, g, or t
  misc_feature (855)..(856): n is a, c, g, or t
  misc_feature (859)..(860): n is a, c, g, or t
  misc_feature (868)..(869): n is a, c, g, or t
  misc_feature (872)..(872): n is a, c, g, or t
  misc_feature (877)..(878): n is a, c, g, or t
  misc_feature (886)..(886): n is a, c, g, or t
  misc_feature (892)..(892): n is a, c, g, or t
  misc_feature (896)..(897): n is a, c, g, or t
  misc_feature (900)..(900): n is a, c, g, or t
  misc_feature (902)..(902): n is a, c, g, or t
caattccattgaatcaaaggagacgancaatatagagggggaaaaaaaaaagaaggggaaagcagttagtttaaaaagttgagagaacaaagtatgttttgcttggatgggcaaccaaagaagcctgccaggaatggtcggtaaaaggtgtnagagtcatgaaacgtcttctgtccaaccgttaccggaaacatgcaaggaatttcctanactggccaggattggattgtgggaaaggtctcttcaagcctccccttggcttttatggcaagaaaatantgcggactatananagccgtcgttctcaaagcttgtccccaatancagaaaagcattgtcctaaattccctaaaaggcaccgtgaaataaatattacgangacacgatggcacaagaaggagctttcaactctgccaccagaacagttatacttcntantnaccatgttgccctgttcaatgacaaggcacgctctccancanaaagggaaaaggactganttcgcacatgaaanacccacctgttgtttggcaagctactgaagatctttcncatgattgaacnanatggatgcacncaggtctccngncgcttgggtggaaaggtatccgctatantgggccaacananaatcgntgcctgatgccgcgtgttccggtgtctcncagggggccggtctttgtcaaaagaccgtcngtgcccgaataaatgcaganaagcacccgtntcnggtggcncaaggngtcttncatntgtcaattttcttnacggaaggaggtnctttggcaatncgggggattcctnttccctnccnccaaattctctnggatttcgggtnnnctttggncnncctcnnccnnatctcttnnatntttgnnactttttngaattnaaannggncncc

SEQ ID NO: 400 - DNA, 881 bp, Artificial Sequence
  Description of Artificial Sequence: Note = Synthetic Construct
  misc_feature (189)..(189): n is a, c, g, or t
  misc_feature (193)..(193): n is a, c, g, or t
  misc_feature (196)..(196): n is a, c, g, or t
  misc_feature (206)..(206): n is a, c, g, or t
  misc_feature (362)..(362): n is a, c, g, or t
  misc_feature (381)..(381): n is a, c, g, or t
  misc_feature (469)..(469): n is a, c, g, or t
  misc_feature (479)..(479): n is a, c, g, or t
  misc_feature (584)..(584): n is a, c, g, or t
  misc_feature (586)..(586): n is a, c, g, or t
  misc_feature (590)..(590): n is a, c, g, or t
  misc_feature (616)..(616): n is a, c, g, or t
  misc_feature (669)..(669): n is a, c, g, or t
  misc_feature (671)..(671): n is a, c, g, or t
  misc_feature (682)..(682): n is a, c, g, or t
  misc_feature (694)..(694): n is a, c, g, or t
  misc_feature (699)..(699): n is a, c, g, or t
  misc_feature (702)..(702): n is a, c, g, or t
  misc_feature (721)..(721): n is a, c, g, or t
  misc_feature (736)..(737): n is a, c, g, or t
  misc_feature (743)..(744): n is a, c, g, or t
  misc_feature (769)..(769): n is a, c, g, or t
  misc_feature (776)..(776): n is a, c, g, or t
  misc_feature (782)..(782): n is a, c, g, or t
  misc_feature (795)..(795): n is a, c, g, or t
  misc_feature (838)..(838): n is a, c, g, or t
  misc_feature (848)..(848): n is a, c, g, or t
  misc_feature (854)..(854): n is a, c, g, or t
  misc_feature (857)..(858): n is a, c, g, or t
  misc_feature (869)..(870): n is a, c, g, or t
  misc_feature (875)..(875): n is a, c, g, or t
cattccttagaatcagaaagactattccgacttgcctaacccaagtacagatggcatatatcttttagcagagcttacaggggaatattactcattcatatctgctttccaagaaggctagaggtgcagcttgatgccagtgtggacgctgaattggacccctaatatgacctaaaaaagttggaaaangaanaanaacaaaagangcacaatgtactggacatagtctctgaaaacagacaaacaacagaagcaaaacaaattctgggattggctgaagctgtttacttgtctgttaactaagtacttctactctctcttttcaaatgttatttggtctatgtgttctcacatatgtgcangcacctaccgaagccagangaaggtatgggaagctctaaggttgcagtgacaggcagttataagctacctgacaaggatgcaagaaccaaactcgggggcctcttcnaaggcacgancgctctcaatcactgaagcatctaggtctctacccaaagttcaatgatccttttcatttaaattgttcatttgaagtgcggcatgggaataaaagaagccaggtntntccnccatgcactctaaatgtctggaaccnacatttaaacacttcggccaaaatcccgaacctgccggctcttccctacctcntntccctactatnaatgaaatatcncttcnaancaacctttttctcaggttntaaactaaaacaagnncatttnnaataggaagaaagtccggggaaaantttctcnctcctncccccgaaaatcntcggtaagaggacgttccgagttacccaaaaaaacttttgttnccccccgacnaaggtnctnnaatcccccttnnttatntattca

SEQ ID NO: 401 - DNA, 901 bp, Artificial Sequence
  Description of Artificial Sequence: Note = Synthetic Construct
  misc_feature (22)..(22): n is a, c, g, or t
  misc_feature (30)..(30): n is a, c, g, or t
  misc_feature (150)..(150): n is a, c, g, or t
  misc_feature (203)..(203): n is a, c, g, or t
  misc_feature (283)..(283): n is a, c, g, or t
  misc_feature (285)..(285): n is a, c, g, or t
  misc_feature (287)..(287): n is a, c, g, or t
  misc_feature (319)..(319): n is a, c, g, or t
  misc_feature (364)..(364): n is a, c, g, or t
  misc_feature (429)..(429): n is a, c, g, or t
  misc_feature (456)..(456): n is a, c, g, or t
  misc_feature (469)..(469): n is a, c, g, or t
  misc_feature (472)..(472): n is a, c, g, or t
  misc_feature (494)..(494): n is a, c, g, or t
  misc_feature (504)..(504): n is a, c, g, or t
  misc_feature (543)..(543): n is a, c, g, or t
  misc_feature (568)..(568): n is a, c, g, or t
  misc_feature (588)..(588): n is a, c, g, or t
  misc_feature (618)..(618): n is a, c, g, or t
  misc_feature (623)..(623): n is a, c, g, or t
  misc_feature (634)..(634): n is a, c, g, or t
  misc_feature (636)..(636): n is a, c, g, or t
  misc_feature (650)..(650): n is a, c, g, or t
  misc_feature (698)..(699): n is a, c, g, or t
  misc_feature (722)..(722): n is a, c, g, or t
  misc_feature (725)..(726): n is a, c, g, or t
  misc_feature (730)..(730): n is a, c, g, or t
  misc_feature (733)..(733): n is a, c, g, or t
  misc_feature (738)..(739): n is a, c, g, or t
  misc_feature (763)..(763): n is a, c, g, or t
  misc_feature (774)..(774): n is a, c, g, or t
  misc_feature (779)..(779): n is a, c, g, or t
  misc_feature (783)..(783): n is a, c, g, or t
  misc_feature (786)..(786): n is a, c, g, or t
  misc_feature (792)..(792): n is a, c, g, or t
  misc_feature (801)..(801): n is a, c, g, or t
  misc_feature (809)..(809): n is a, c, g, or t
  misc_feature (820)..(820): n is a, c, g, or t
  misc_feature (825)..(826): n is a, c, g, or t
  misc_feature (833)..(833): n is a, c, g, or t
  misc_feature (841)..(841): n is a, c, g, or t
  misc_feature (864)..(864): n is a, c, g, or t
  misc_feature (877)..(877): n is a, c, g, or t
  misc_feature (882)..(883): n is a, c, g, or t
cattccttgcaaagatagaccnatataganggggaaaaaaaaaagaaggggaaagcagttagtttaaaaagttgagagaacaaagtatgttttgcttggatgggcaaccaaagaagcctgccaggaaatggtcggtaaaaggtgtaagantcatgaaacgtcttctgtccaaccgttaccggaacatgcaaggaatttcctanactggccaggattggattgtgggaaaggtctcttcaagcctccccttggcttttatggcaagaaaatatgcggactatanananccgtcgttctcaaagcttgtccccaatagcanaaaagcattgtcctaaattccctaaaaggcaccgtgaaataaatnttacgaggacacgatggcacaagaaggactttcaactctgccaccagaacagttatacttcatantaaccatgttgccctgttcaatgacangcacgctctccancanaaagggaaaaggactgaattcncacatgaaanacccacctgtagtttggcaagctaactgaggatctttcncatgattgaacaaatggatgcaccnggtctccggccgcttgggtngaaagctatccgctataatgggccacaaanatcgntgcctgatccncntgtccgctgtctcncaggggccccgtctttgtcaaacgacttccgtgcctgataactcagannagcaccggtttctggtggccaanggnntctnccnctttnncactttctaacggaaggatggtgntttggcaatcnggagntccnttnccctgnccccaaatnctccggtntcatggggggnttctnntcggtcncctccccncaaatcctcaaaacttcgttaangtttttgaattgnaaaannggggccccaattccccgg

SEQ ID NO: 402 - DNA, 913 bp, Artificial Sequence
  Description of Artificial Sequence: Note = Synthetic Construct
  misc_feature (16)..(16): n is a, c, g, or t
  misc_feature (22)..(22): n is a, c, g, or t
  misc_feature (83)..(83): n is a, c, g, or t
  misc_feature (225)..(225): n is a, c, g, or t
  misc_feature (231)..(231): n is a, c, g, or t
  misc_feature (351)..(351): n is a, c, g, or t
  misc_feature (382)..(382): n is a, c, g, or t
  misc_feature (386)..(386): n is a, c, g, or t
  misc_feature (388)..(388): n is a, c, g, or t
  misc_feature (391)..(391): n is a, c, g, or t
  misc_feature (424)..(424): n is a, c, g, or t
  misc_feature (445)..(445): n is a, c, g, or t
  misc_feature (472)..(472): n is a, c, g, or t
  misc_feature (477)..(477): n is a, c, g, or t
  misc_feature (482)..(482): n is a, c, g, or t
  misc_feature (489)..(489): n is a, c, g, or t
  misc_feature (494)..(494): n is a, c, g, or t
  misc_feature (586)..(586): n is a, c, g, or t
  misc_feature (620)..(620): n is a, c, g, or t
  misc_feature (636)..(636): n is a, c, g, or t
  misc_feature (663)..(663): n is a, c, g, or t
  misc_feature (674)..(674): n is a, c, g, or t
  misc_feature (713)..(713): n is a, c, g, or t
  misc_feature (716)..(716): n is a, c, g, or t
  misc_feature (740)..(740): n is a, c, g, or t
  misc_feature (745)..(745): n is a, c, g, or t
  misc_feature (752)..(752): n is a, c, g, or t
  misc_feature (758)..(758): n is a, c, g, or t
  misc_feature (769)..(769): n is a, c, g, or t
  misc_feature (821)..(821): n is a, c, g, or t
  misc_feature (836)..(836): n is a, c, g, or t
  misc_feature (855)..(855): n is a, c, g, or t
  misc_feature (862)..(862): n is a, c, g, or t
  misc_feature (893)..(893): n is a, c, g, or t
cattccattaatctangctctncaccaacctcttatttattttacaatgaaagttcgaatcccagtgtccccctggagacaangttcctggagtatgtccatgggcagtggcaaagcagctgccactcttcctaggtctctctgtggcctctctctccaaggcacatgaaatttaccacagcatatgcatttcctttctttttgagacagggtttctctgtgtanacttanctgtcctggaactcattctggagtttcttatcaggccagcctccaactcgtggagatccacttgtctctgcttcctgagtgccaccacccctggcctggcatatacacagtcaattccanaaaccgctttgctatcttggaactaatgaangtananganaagactctggttcatctggtgctgataactganggacagaacccaagggaagancccaatctggggaacaacatcatgttncaganaacantttccancatcncaagtatcaacatcctgcttctaaggaaaactaaaactgactgcattggaaggaaacaggatctgaatattgcatttctgttttgcctaagntctgtctttaacttcctaataaaacaaggtgcanggacaaatgggaaganaatgctgccacaacaggtctggggganaggaacatctngcttctcactccctatacgatctacaaaaatatgatttnggntcttcccacttggctaaaatcagnaggtncttcagnaatgangggtcggaccntgcaaaccaccgttttatagtaggttaataaaatatgtctggaggaaatccnaaaggtaaacccctntttcctgaacccccgttancctggtngttgtaagtggttttaatcaaacccccggcncaaaaagaaacttttttaaa

SEQ ID NO: 403 - DNA, 977 bp, Artificial Sequence
  Description of Artificial Sequence: Note = Synthetic Construct
  misc_feature (35)..(35): n is a, c, g, or t
  misc_feature (39)..(39): n is a, c, g, or t
  misc_feature (450)..(450): n is a, c, g, or t
  misc_feature (456)..(456): n is a, c, g, or t
  misc_feature (459)..(459): n is a, c, g, or t
  misc_feature (461)..(461): n is a, c, g, or t
  misc_feature (492)..(492): n is a, c, g, or t
  misc_feature (568)..(568): n is a, c, g, or t
  misc_feature (598)..(598): n is a, c, g, or t
  misc_feature (625)..(625): n is a, c, g, or t
  misc_feature (636)..(636): n is a, c, g, or t
  misc_feature (676)..(676): n is a, c, g, or t
  misc_feature (701)..(701): n is a, c, g, or t
  misc_feature (716)..(716): n is a, c, g, or t
  misc_feature (718)..(718): n is a, c, g, or t
  misc_feature (720)..(720): n is a, c, g, or t
  misc_feature (737)..(737): n is a, c, g, or t
  misc_feature (739)..(739): n is a, c, g, or t
  misc_feature (754)..(754): n is a, c, g, or t
  misc_feature (756)..(757): n is a, c, g, or t
  misc_feature (764)..(764): n is a, c, g, or t
  misc_feature (768)..(768): n is a, c, g, or t
  misc_feature (795)..(795): n is a, c, g, or t
  misc_feature (803)..(803): n is a, c, g, or t
  misc_feature (813)..(814): n is a, c, g, or t
  misc_feature (816)..(816): n is a, c, g, or t
  misc_feature (822)..(822): n is a, c, g, or t
  misc_feature (829)..(829): n is a, c, g, or t
  misc_feature (836)..(837): n is a, c, g, or t
  misc_feature (841)..(841): n is a, c, g, or t
  misc_feature (843)..(843): n is a, c, g, or t
  misc_feature (850)..(851): n is a, c, g, or t
  misc_feature (854)..(854): n is a, c, g, or t
  misc_feature (873)..(873): n is a, c, g, or t
  misc_feature (878)..(878): n is a, c, g, or t
  misc_feature (880)..(880): n is a, c, g, or t
  misc_feature (884)..(885): n is a, c, g, or t
  misc_feature (888)..(890): n is a, c, g, or t
  misc_feature (898)..(898): n is a, c, g, or t
  misc_feature (903)..(903): n is a, c, g, or t
  misc_feature (914)..(914): n is a, c, g, or t
  misc_feature (917)..(918): n is a, c, g, or t
  misc_feature (927)..(927): n is a, c, g, or t
  misc_feature (940)..(940): n is a, c, g, or t
  misc_feature (943)..(943): n is a, c, g, or t
  misc_feature (945)..(945): n is a, c, g, or t
  misc_feature (948)..(949): n is a, c, g, or t
  misc_feature (960)..(960): n is a, c, g, or t
  misc_feature (966)..(966): n is a, c, g, or t
  misc_feature (974)..(975): n is a, c, g, or t
attcaacagatttcacgggcccataaataaacaanatanaagcccatacagaggagacacaaaaatccctgaaagaattctaggcctctgcaccaacctcttatttattttacaatgaagttcgaatcccagtgtccccctggagacaaggttcctggagtatgtccatgggcagtggcaaagcagctgccactcttcctaggtctctctgtggcctctctctccaaggcacatgaaatttaccacagcatatgcatttccttttctttttgagacagggtttctctgtgtagacttagctgtcctggaactcattctggagtttcttatcaggccagcctccaactcgtggagatccacttgtctctgcttcctgagtgccaccacccctggcctggcatatacacagtcaattccagaaaccgctttgctatcttggaactaatgaangtacanganangacctctggtcatctggtgctgataactganggacagaacccaagggaagagcccaatctggggacaacatcatgttcagagaaacagttccaagcatcacaaagtntcaacatcctgcttccaaaggaagacctanaactgactcattggagggaaagcaggntcgaatatttnaatttctggtttgccctaagggccgtccttaactcctatnaagcaaggtgaaggacaaacgggangaaactgtgcaaaanangnctgggaaaggaaatccngntccaacccagtaaangnnttaaaanatangatgccggttcttcaactggctaaatnaggaggtntcaggattgnngncaggcnaaggaanaccaaanntttnangggaggnnatnaaaatttcttggggaatcnggaangnaaannccnnntttatggnaaaantttccttgagnctnnaagggttanctaaccccgcctnaangnganntttttgcaaantttttngcttcccnntt

SEQ ID NO: 404 - DNA, 959 bp, Artificial Sequence; identical to SEQ ID NO: 369
  Description of Artificial Sequence: Note = Synthetic Construct
  misc_feature (17)..(17): n is a, c, g, or t
  misc_feature (19)..(20): n is a, c, g, or t
  misc_feature (34)..(34): n is a, c, g, or t
  misc_feature (231)..(231): n is a, c, g, or t
  misc_feature (257)..(257): n is a, c, g, or t
  misc_feature (259)..(259): n is a, c, g, or t
  misc_feature (280)..(280): n is a, c, g, or t
  misc_feature (360)..(360): n is a, c, g, or t
  misc_feature (362)..(362): n is a, c, g, or t
  misc_feature (442)..(442): n is a, c, g, or t
  misc_feature (444)..(444): n is a, c, g, or t
  misc_feature (448)..(448): n is a, c, g, or t
  misc_feature (467)..(467): n is a, c, g, or t
  misc_feature (507)..(507): n is a, c, g, or t
  misc_feature (546)..(546): n is a, c, g, or t
  misc_feature (560)..(560): n is a, c, g, or t
  misc_feature (582)..(582): n is a, c, g, or t
  misc_feature (605)..(605): n is a, c, g, or t
  misc_feature (609)..(609): n is a, c, g, or t
  misc_feature (640)..(640): n is a, c, g, or t
  misc_feature (642)..(642): n is a, c, g, or t
  misc_feature (655)..(657): n is a, c, g, or t
  misc_feature (697)..(697): n is a, c, g, or t
  misc_feature (703)..(703): n is a, c, g, or t
  misc_feature (711)..(711): n is a, c, g, or t
  misc_feature (720)..(720): n is a, c, g, or t
  misc_feature (728)..(728): n is a, c, g, or t
  misc_feature (735)..(735): n is a, c, g, or t
  misc_feature (743)..(743): n is a, c, g, or t
  misc_feature (754)..(754): n is a, c, g, or t
  misc_feature (758)..(758): n is a, c, g, or t
  misc_feature (762)..(762): n is a, c, g, or t
  misc_feature (773)..(773): n is a, c, g, or t
  misc_feature (779)..(779): n is a, c, g, or t
  misc_feature (781)..(781): n is a, c, g, or t
  misc_feature (783)..(783): n is a, c, g, or t
  misc_feature (788)..(788): n is a, c, g, or t
  misc_feature (795)..(795): n is a, c, g, or t
  misc_feature (801)..(801): n is a, c, g, or t
  misc_feature (821)..(821): n is a, c, g, or t
  misc_feature (837)..(837): n is a, c, g, or t
  misc_feature (842)..(842): n is a, c, g, or t
  misc_feature (851)..(851): n is a, c, g, or t
  misc_feature (853)..(853): n is a, c, g, or t
  misc_feature (862)..(862): n is a, c, g, or t
  misc_feature (870)..(870): n is a, c, g, or t
  misc_feature (873)..(873): n is a, c, g, or t
  misc_feature (876)..(876): n is a, c, g, or t
  misc_feature (881)..(881): n is a, c, g, or t
  misc_feature (906)..(906): n is a, c, g, or t
  misc_feature (911)..(911): n is a, c, g, or t
  misc_feature (920)..(920): n is a, c, g, or t
  misc_feature (930)..(931): n is a, c, g, or t
  misc_feature (940)..(940): n is a, c, g, or t

SEQ ID NO: 405 - DNA, 966 bp, Artificial Sequence
  Description of Artificial Sequence: Note = Synthetic Construct
  misc_feature (22)..(22): n is a, c, g, or t
  misc_feature (26)..(26): n is a, c, g, or t
  misc_feature (49)..(49): n is a, c, g, or t
  misc_feature (454)..(454): n is a, c, g, or t
  misc_feature (518)..(518): n is a, c, g, or t
  misc_feature (520)..(520): n is a, c, g, or t
  misc_feature (558)..(558): n is a, c, g, or t
  misc_feature (569)..(569): n is a, c, g, or t
  misc_feature (624)..(624): n is a, c, g, or t
  misc_feature (648)..(648): n is a, c, g, or t
  misc_feature (658)..(658): n is a, c, g, or t
  misc_feature (663)..(663): n is a, c, g, or t
  misc_feature (683)..(683): n is a, c, g, or t
  misc_feature (697)..(697): n is a, c, g, or t
  misc_feature (711)..(711): n is a, c, g, or t
  misc_feature (718)..(718): n is a, c, g, or t
  misc_feature (720)..(721): n is a, c, g, or t
  misc_feature (746)..(746): n is a, c, g, or t
  misc_feature (759)..(760): n is a, c, g, or t
  misc_feature (762)..(763): n is a, c, g, or t
  misc_feature (773)..(773): n is a, c, g, or t
  misc_feature (776)..(776): n is a, c, g, or t
  misc_feature (785)..(785): n is a, c, g, or t
  misc_feature (801)..(801): n is a, c, g, or t
  misc_feature (818)..(818): n is a, c, g, or t
  misc_feature (820)..(821): n is a, c, g, or t
  misc_feature (827)..(827): n is a, c, g, or t
  misc_feature (829)..(829): n is a, c, g, or t
  misc_feature (831)..(831): n is a, c, g, or t
  misc_feature (834)..(834): n is a, c, g, or t
  misc_feature (839)..(839): n is a, c, g, or t
  misc_feature (845)..(845): n is a, c, g, or t
  misc_feature (848)..(848): n is a, c, g, or t
  misc_feature (852)..(852): n is a, c, g, or t
  misc_feature (871)..(871): n is a, c, g, or t
  misc_feature (873)..(873): n is a, c, g, or t
  misc_feature (898)..(898): n is a, c, g, or t
  misc_feature (913)..(913): n is a, c, g, or t
  misc_feature (925)..(925): n is a, c, g, or t
  misc_feature (927)..(927): n is a, c, g, or t
  misc_feature (931)..(931): n is a, c, g, or t
  misc_feature (941)..(941): n is a, c, g, or t
  misc_feature (956)..(956): n is a, c, g, or t
  misc_feature (958)..(958): n is a, c, g, or t
  misc_feature (963)..(963): n is a, c, g, or t
  misc_feature (965)..(965): n is a, c, g, or t
attcacacagattccgtcgacnacanaatgtgtgtacaccgttgtctcnattttgacatgttggtttgggtcatgtctgtcacattttattttctagcatgaaaagagaactttagggcagtctcattggaaaacaaagaaaataagattacagttccctcagatcaacctcggagccactcagacagcagggctgagcctctgactcccaagcaccagaggctccatgccaactcccagctttgtgttgcagaggtgtgagaactcattctcattgctaggaaaaaaattaaactcaacagacagacatgggacatgggagccaaattccacaagaacacccttgagttttaagttgttatttttccccctcctctttttgacaatgtttagaaaaccagagtctataaacgtgtaaaaggaatcctgggatggcttacagaaataggaaggncagcaaaacatttagtaatattaattttagaaaggcatttaaactgattacaataatccccaangngggataaactttacatcataaatgcttgctaaagtganctgtaatgacnactgctggtgaccgtccaatcaactcaattggccaagcctagtccatggacgggncctaaacattcctccgaggaaganaatggttcanaaggnaaacaccaactgcctaacanattcctaatccccnggttcgaaaacttnaacgcantnngcgaagaatcagtccgcttcctgtnaatttccaggctnntnnagattcccangancagttcatnccaggtaaagtccggnaagcccaaatactccgntnnacaaangngnggncctcntccaanggnaaantttaggtccaaacaaactngnctgggttgcctaaggggccaaaacncggaggggttcaagnccgaaaaccccngntttnccgaattctngcaaaataaagggcngnggatnanc

SEQ ID NO: 406 - DNA, 1025 bp, Artificial Sequence
  Description of Artificial Sequence: Note = Synthetic Construct
  misc_feature (19)..(19): n is a, c, g, or t
  misc_feature (21)..(21): n is a, c, g, or t
  misc_feature (32)..(32): n is a, c, g, or t
  misc_feature (36)..(36): n is a, c, g, or t
  misc_feature (44)..(44): n is a, c, g, or t
  misc_feature (75)..(75): n is a, c, g, or t
  misc_feature (211)..(211): n is a, c, g, or t
  misc_feature (259)..(259): n is a, c, g, or t
  misc_feature (398)..(398): n is a, c, g, or t
  misc_feature (450)..(450): n is a, c, g, or t
  misc_feature (452)..(452): n is a, c, g, or t
  misc_feature (457)..(457): n is a, c, g, or t
  misc_feature (459)..(459): n is a, c, g, or t
  misc_feature (495)..(495): n is a, c, g, or t
  misc_feature (513)..(513): n is a, c, g, or t
  misc_feature (563)..(563): n is a, c, g, or t
  misc_feature (579)..(579): n is a, c, g, or t
  misc_feature (603)..(603): n is a, c, g, or t
  misc_feature (607)..(607): n is a, c, g, or t
  misc_feature (632)..(632): n is a, c, g, or t
  misc_feature (636)..(636): n is a, c, g, or t
  misc_feature (669)..(669): n is a, c, g, or t
  misc_feature (678)..(678): n is a, c, g, or t
  misc_feature (682)..(682): n is a, c, g, or t
  misc_feature (689)..(689): n is a, c, g, or t
  misc_feature (721)..(721): n is a, c, g, or t
  misc_feature (737)..(737): n is a, c, g, or t
  misc_feature (741)..(741): n is a, c, g, or t
  misc_feature (743)..(743): n is a, c, g, or t
  misc_feature (745)..(745): n is a, c, g, or t
  misc_feature (755)..(756): n is a, c, g, or t
  misc_feature (768)..(768): n is a, c, g, or t
  misc_feature (779)..(779): n is a, c, g, or t
  misc_feature (781)..(781): n is a, c, g, or t
  misc_feature (784)..(784): n is a, c, g, or t
  misc_feature (796)..(796): n is a, c, g, or t
  misc_feature (803)..(803): n is a, c, g, or t
  misc_feature (810)..(810): n is a, c, g, or t
  misc_feature (819)..(819): n is a, c, g, or t
  misc_feature (849)..(850): n is a, c, g, or t
  misc_feature (852)..(853): n is a, c, g, or t
  misc_feature (863)..(864): n is a, c, g, or t
  misc_feature (870)..(870): n is a, c, g, or t
  misc_feature (877)..(877): n is a, c, g, or t
  misc_feature (890)..(890): n is a, c, g, or t
  misc_feature (905)..(905): n is a, c, g, or t
  misc_feature (907)..(908): n is a, c, g, or t
  misc_feature (914)..(914): n is a, c, g, or t
  misc_feature (922)..(923): n is a, c, g, or t
  misc_feature (928)..(928): n is a, c, g, or t
  misc_feature (937)..(937): n is a, c, g, or t
  misc_feature (955)..(955): n is a, c, g, or t
  misc_feature (957)..(957): n is a, c, g, or t
  misc_feature (961)..(961): n is a, c, g, or t
  misc_feature (963)..(963): n is a, c, g, or t
  misc_feature (982)..(982): n is a, c, g, or t
  misc_feature (991)..(994): n is a, c, g, or t
  misc_feature (999)..(1000): n is a, c, g, or t
  misc_feature (1013)..(1013): n is a, c, g, or t
  misc_feature (1018)..(1018): n is a, c, g, or t
  misc_feature (1020)..(1020): n is a, c, g, or t
attcaacagattcagctgncnctctttaggcnaaangaagcgangcacacgagtgggagaaaagctacagcccangcatcgtcctttgcctccctctctctctcttttgcccatcactaagcaaccattctttgtgctcaagcctacacatctttgtgcattgtaacccttggttacttgaatcaacagctctatttgatagtgtgctganggggatgactattctgtatattcctgctttaggtcagtcacaatgaanaacaagtcattttgacctctattatgattcgagggcttctcttccatgttcccatagcatcatattgcagcgcagaacacaaatcccacttcaatcacccattttcttgctcctttggccccctacactgtttctgganagtaagtgctgcaccttgtctgtgcgtaaccatatcctgtggattcagcaanangctanangttccgagatctctaactgcgggatgaatgagtganagaatgcgtccctgcaantcaagccttgggtgttaaaagtatggtattaagtttaaagaataggcaancaggctgaatggacanagacgggaaggggtagacaagatngaanaggttgttttggatgaacaagtgtncaantacaagctacagatctgaagctatttccccccngagcaaaanatgnaagtggnaaatatgccattacagacagcaagaacacacnaacaaaaggcccgttntccnangnaaggaaaaanncccccaacaaanggtctaacgananaanaccccccaatgnttggggntttcccnagaaaaaanatcattttaggcaaagggaccattgaaaanngnncacacatgannggtttnttaattnggggaacgccttnccccttgggggttananncacccnggaaactnncccgngggaacccnaatgggaaatcccccgangnaaantncaaaaatcaaggggaaatntggggaaannnnctccnngggttaattctanaaacnanccctg

SEQ ID NO: 407 - DNA, 954 bp, Artificial Sequence
  Description of Artificial Sequence: Note = Synthetic Construct
  misc_feature (10)..(10): n is a, c, g, or t
  misc_feature (12)..(12): n is a, c, g, or t
  misc_feature (15)..(15): n is a, c, g, or t
  misc_feature (21)..(22): n is a, c, g, or t
  misc_feature (27)..(27): n is a, c, g, or t
  misc_feature (37)..(37): n is a, c, g, or t
  misc_feature (41)..(41): n is a, c, g, or t
  misc_feature (43)..(43): n is a, c, g, or t
  misc_feature (48)..(48): n is a, c, g, or t
  misc_feature (52)..(52): n is a, c, g, or t
  misc_feature (61)..(61): n is a, c, g, or t
  misc_feature (65)..(65): n is a, c, g, or t
  misc_feature (75)..(75): n is a, c, g, or t
  misc_feature (82)..(84): n is a, c, g, or t
  misc_feature (93)..(94): n is a, c, g, or t
  misc_feature (101)..(101): n is a, c, g, or t
  misc_feature (103)..(103): n is a, c, g, or t
  misc_feature (105)..(105): n is a, c, g, or t
  misc_feature (107)..(107): n is a, c, g, or t
  misc_feature (115)..(115): n is a, c, g, or t
  misc_feature (125)..(125): n is a, c, g, or t
  misc_feature (136)..(139): n is a, c, g, or t
  misc_feature (141)..(142): n is a, c, g, or t
  misc_feature (149)..(149): n is a, c, g, or t
  misc_feature (176)..(176): n is a, c, g, or t
  misc_feature (179)..(179): n is a, c, g, or t
  misc_feature (181)..(181): n is a, c, g, or t
  misc_feature (186)..(186): n is a, c, g, or t
  misc_feature (192)..(192): n is a, c, g, or t
  misc_feature (195)..(195): n is a, c, g, or t
  misc_feature (198)..(199): n is a, c, g, or t
  misc_feature (203)..(203): n is a, c, g, or t
  misc_feature (206)..(206): n is a, c, g, or t
  misc_feature (220)..(220): n is a, c, g, or t
  misc_feature (222)..(222): n is a, c, g, or t
  misc_feature (225)..(225): n is a, c, g, or t
  misc_feature (227)..(228): n is a, c, g, or t
  misc_feature (235)..(235): n is a, c, g, or t
  misc_feature (237)..(237): n is a, c, g, or t
  misc_feature (244)..(244): n is a, c, g, or t
  misc_feature (249)..(249): n is a, c, g, or t
  misc_feature (252)..(253): n is a, c, g, or t
  misc_feature (257)..(257): n is a, c, g, or t
  misc_feature (259)..(259): n is a, c, g, or t
  misc_feature (261)..(261): n is a, c, g, or t
  misc_feature (265)..(265): n is a, c, g, or t
  misc_feature (267)..(269): n is a, c, g, or t
  misc_feature (272)..(272): n is a, c, g, or t
  misc_feature (274)..(274): n is a, c, g, or t
  misc_feature (276)..(276): n is a, c, g, or t
  misc_feature (279)..(279): n is a, c, g, or t
  misc_feature (285)..(286): n is a, c, g, or t
  misc_feature (291)..(292): n is a, c, g, or t
  misc_feature (304)..(304): n is a, c, g, or t
  misc_feature (313)..(314): n is a, c, g, or t
  misc_feature (316)..(316): n is a, c, g, or t
  misc_feature (318)..(318): n is a, c, g, or t
  misc_feature (320)..(320): n is a, c, g, or t
  misc_feature (323)..(323): n is a, c, g, or t
  misc_feature (331)..(331): n is a, c, g, or t
  misc_feature (335)..(335): n is a, c, g, or t
  misc_feature (344)..(344): n is a, c, g, or t
  misc_feature (349)..(349): n is a, c, g, or t
  misc_feature (356)..(356): n is a, c, g, or t
  misc_feature (359)..(359): n is a, c, g, or t
  misc_feature (362)..(362): n is a, c, g, or t
  misc_feature (367)..(367): n is a, c, g, or t
  misc_feature (369)..(370): n is a, c, g, or t
  misc_feature (384)..(385): n is a, c, g, or t
  misc_feature (393)..(394): n is a, c, g, or t
  misc_feature (397)..(397): n is a, c, g, or t
  misc_feature (415)..(416): n is a, c, g, or t
  misc_feature (439)..(439): n is a, c, g, or t
  misc_feature (447)..(447): n is a, c, g, or t
  misc_feature (449)..(450): n is a, c, g, or t
  misc_feature (452)..(452): n is a, c, g, or t
  misc_feature (463)..(464): n is a, c, g, or t
  misc_feature (467)..(467): n is a, c, g, or t
  misc_feature (486)..(486): n is a, c, g, or t
  misc_feature (491)..(491): n is a, c, g, or t
  misc_feature (493)..(493): n is a, c, g, or t
  misc_feature (495)..(495): n is a, c, g, or t
  misc_feature (497)..(497): n is a, c, g, or t
  misc_feature (502)..(502): n is a, c, g, or t
  misc_feature (504)..(504): n is a, c, g, or t
  misc_feature (507)..(507): n is a, c, g, or t
  misc_feature (511)..(511): n is a, c, g, or t
  misc_feature (525)..(526): n is a, c, g, or t
  misc_feature (532)..(532): n is a, c, g, or t
  misc_feature (546)..(546): n is a, c, g, or t
  misc_feature (548)..(548): n is a, c, g, or t
  misc_feature (551)..(551): n is a, c, g, or t
  misc_feature (555)..(555): n is a, c, g, or t
  misc_feature (557)..(558): n is a, c, g, or t
  misc_feature (565)..(566): n is a, c, g, or t
  misc_feature (568)..(568): n is a, c, g, or t
  misc_feature (571)..(571): n is a, c, g, or t
  misc_feature (575)..(575): n is a, c, g, or t
  misc_feature (590)..(590): n is a, c, g, or t
  misc_feature (607)..(607): n is a, c, g, or t
  misc_feature (627)..(627): n is a, c, g, or t
  misc_feature (643)..(643): n is a, c, g, or t
  misc_feature (652)..(652): n is a, c, g, or t
  misc_feature (656)..(656): n is a, c, g, or t
  misc_feature (658)..(658): n is a, c, g, or t
  misc_feature (663)..(663): n is a, c, g, or t
  misc_feature (669)..(669): n is a, c, g, or t
  misc_feature (673)..(673): n is a, c, g, or t
  misc_feature (680)..(680): n is a, c, g, or t
  misc_feature (690)..(690): n is a, c, g, or t
  misc_feature (692)..(692): n is a, c, g, or t
  misc_feature (697)..(697): n is a, c, g, or t
  misc_feature (700)..(700): n is a, c, g, or t
  misc_feature (703)..(703): n is a, c, g, or t
  misc_feature (707)..(707): n is a, c, g, or t
  misc_feature (717)..(717): n is a, c, g, or t
  misc_feature (734)..(734): n is a, c, g, or t
  misc_feature (738)..(738): n is a, c, g, or t
  misc_feature (740)..(741): n is a, c, g, or t
  misc_feature (745)..(745): n is a, c, g, or t
  misc_feature (750)..(750): n is a, c, g, or t
  misc_feature (752)..(753): n is a, c, g, or t
  misc_feature (756)..(757): n is a, c, g, or t
  misc_feature (761)..(761): n is a, c, g, or t
  misc_feature (767)..(768): n is a, c, g, or t
  misc_feature (773)..(775): n is a, c, g, or t
  misc_feature (778)..(778): n is a, c, g, or t
  misc_feature (787)..(787): n is a, c, g, or t
  misc_feature (790)..(790): n is a, c, g, or t
  misc_feature (814)..(814): n is a, c, g, or t
  misc_feature (816)..(816): n is a, c, g, or t
  misc_feature (827)..(827): n is a, c, g, or t
  misc_feature (838)..(838): n is a, c, g, or t
  misc_feature (862)..(862): n is a, c, g, or t
  misc_feature (867)..(868): n is a, c, g, or t
  misc_feature (886)..(887): n is a, c, g, or t
  misc_feature (891)..(891): n is a, c, g, or t
  misc_feature (905)..(905): n is a, c, g, or t
  misc_feature (907)..(907): n is a, c, g, or t
  misc_feature (909)..(909): n is a, c, g, or t
  misc_feature (914)..(914): n is a, c, g, or t
  misc_feature (918)..(918): n is a, c, g, or t
  misc_feature (922)..(922): n is a, c, g, or t
  misc_feature (931)..(931): n is a, c, g, or t
  misc_feature (938)..(938): n is a, c, g, or t
  misc_feature (945)..(945): n is a, c, g, or t
  misc_feature (948)..(948): n is a, c, g, or t
ccaattcatntnaantcagtnngggcnctttatgcanaacntnataanagtngccctgcangagnaagaacaggngttaacnnnacaggcccnngtggtancnangnaattccantctttcaacnttatggccaannnncnnaactgtnggttttcttcaggacttggggaccgantcncnggtcntgttcnttncanngaangcncccgtctactgagntngtncnntatcccncncccactntattnctnncttncntngaancnnnttncnanttntttccnngcctnngtgattccccancttacactnnantnancantttgcaancctngtttagaanccccncgaatgnacnctntcccngnntcttaattccgggnnccgtgagnnttnttcagcgggaaccttctnnctgggtgggaatatccgggtttngaaacctncnntntgaattcagcnnccnggcccgaccttgagggatnccaancntntnccccnanganattngtcctcgatgaaannaacctncctgggctggcctnanccntaantnntaattcnnanctngttngggtatcccgaggancgcctgtaaaatgtgtnggatgtccccttcaaaaacncttcccggaagaatanaggttaacnctgnanttttnggaagnaccnggaaatnaaccgagggnanatttnctnttnaaancctttccccnggggaaaattatccaanccgngnncganggaancnnacnngaanaactcnntttannnttnaaccttctngcngggggtataaaaaaagggccttanancccctttaagnattttctttancggcttctttcgggaaggataatntcccnncctatttaatcttccgtnncccnttcgttctccgggngngnaaganaaancttnctttccggnccccttnttttttngtnaaaaaa

SEQ ID NO: 408 - DNA, 866 bp, Artificial Sequence
  Description of Artificial Sequence: Note = Synthetic Construct
  misc_feature (7)..(7): n is a, c, g, or t
  misc_feature (31)..(31): n is a, c, g, or t
  misc_feature (45)..(45): n is a, c, g, or t
  misc_feature (70)..(70): n is a, c, g, or t
  misc_feature (140)..(140): n is a, c, g, or t
  misc_feature (159)..(159): n is a, c, g, or t
  misc_feature (165)..(165): n is a, c, g, or t
  misc_feature (256)..(256): n is a, c, g, or t
  misc_feature (285)..(285): n is a, c, g, or t
  misc_feature (331)..(331): n is a, c, g, or t
  misc_feature (339)..(339): n is a, c, g, or t
  misc_feature (356)..(356): n is a, c, g, or t
  misc_feature (387)..(387): n is a, c, g, or t
  misc_feature (393)..(393): n is a, c, g, or t
  misc_feature (404)..(404): n is a, c, g, or t
  misc_feature (426)..(426): n is a, c, g, or t
  misc_feature (429)..(429): n is a, c, g, or t
  misc_feature (431)..(431): n is a, c, g, or t
  misc_feature (490)..(490): n is a, c, g, or t
  misc_feature (518)..(518): n is a, c, g, or t
  misc_feature (586)..(586): n is a, c, g, or t
  misc_feature (640)..(640): n is a, c, g, or t
  misc_feature (646)..(646): n is a, c, g, or t
  misc_feature (693)..(693): n is a, c, g, or t
  misc_feature (708)..(708): n is a, c, g, or t
  misc_feature (727)..(727): n is a, c, g, or t
  misc_feature (737)..(737): n is a, c, g, or t
  misc_feature (741)..(741): n is a, c, g, or t
  misc_feature (745)..(745): n is a, c, g, or t
  misc_feature (756)..(756): n is a, c, g, or t
  misc_feature (771)..(771): n is a, c, g, or t
  misc_feature (791)..(791): n is a, c, g, or t
  misc_feature (816)..(817): n is a, c, g, or t
  misc_feature (819)..(819): n is a, c, g, or t
  misc_feature (828)..(828): n is a, c, g, or t
  misc_feature (842)..(843): n is a, c, g, or t
  misc_feature (852)..(852): n is a, c, g, or t
caattcnttagaatctcctagccatttagangaaaggccttgtcncacggtcttctggctgacagatgancaggctctggatggagtgtctgatatatttgcacactgcactaaactctgttcttttatgaccccaagantccattaagctgaagctanaaatangaacatattggaagatgtttttgaacctgtttcatctgacacacacacacacacacacacacacacacacacacacagcacctgggtgaangtcctgcattcagggaatgggcaagctantgagtggagcagattccacctacggctaaagactgggcagacacanaatataanttgcctttggctaaaangtgaccttctggacctgcaaatatatcttanagccanggaaagtttanacttgggcaagggccccatcangantnaataagctttttcttacagattaaagtcctggggcctcaagaatctgctgcccccgaancccaaggcttttgttaaggtgctgaatnacaaatcctttgtttgcctaatcctgctgggccttatctgaacaggctttactgggaacaaaattccnctgcctggaaggaaatactctaacaggtgcctgataaaaagaaactgggatccngaaatnatgttggttaaatagaatctgaattgactccaaaaccgggtcttganccataccttttcccntgccaaccaatggaaaaanccggaaaaanggcnatanctcctttttanctcggcccggaactncccaaaataaggttctaaanaattgaaattcccggtcccaaattnngntttttcccnggaccccctttttnnaaggatttnttcctttttttttt

SEQ ID NO: 409 - DNA, 1016 bp, Artificial Sequence
  Description of Artificial Sequence: Note = Synthetic Construct
  misc_feature (1)..(1): n is a, c, g, or t
  misc_feature (13)..(13): n is a, c, g, or t
  misc_feature (54)..(54): n is a, c, g, or t
  misc_feature (197)..(197): n is a, c, g, or t
  misc_feature (201)..(201): n is a, c, g, or t
  misc_feature (244)..(244): n is a, c, g, or t
  misc_feature (270)..(270): n is a, c, g, or t
  misc_feature (281)..(281): n is a, c, g, or t
  misc_feature (283)..(284): n is a, c, g, or t
  misc_feature (297)..(297): n is a, c, g, or t
  misc_feature (339)..(339): n is a, c, g, or t
  misc_feature (352)..(352): n is a, c, g, or t
  misc_feature (372)..(373): n is a, c, g, or t
  misc_feature (383)..(383): n is a, c, g, or t
  misc_feature (385)..(385): n is a, c, g, or t
  misc_feature (387)..(387): n is a, c, g, or t
  misc_feature (389)..(389): n is a, c, g, or t
  misc_feature (399)..(399): n is a, c, g, or t
  misc_feature (422)..(422): n is a, c, g, or t
  misc_feature (440)..(440): n is a, c, g, or t
  misc_feature (455)..(455): n is a, c, g, or t
  misc_feature (462)..(462): n is a, c, g, or t
  misc_feature (495)..(495): n is a, c, g, or t
  misc_feature (506)..(506): n is a, c, g, or t
  misc_feature (554)..(554): n is a, c, g, or t
  misc_feature (560)..(560): n is a, c, g, or t
  misc_feature (584)..(584): n is a, c, g, or t
  misc_feature (605)..(605): n is a, c, g, or t
  misc_feature (614)..(614): n is a, c, g, or t
  misc_feature (631)..(631): n is a, c, g, or t
  misc_feature (636)..(636): n is a, c, g, or t
  misc_feature (664)..(664): n is a, c, g, or t
  misc_feature (681)..(681): n is a, c, g, or t
  misc_feature (691)..(691): n is a, c, g, or t
  misc_feature (708)..(708): n is a, c, g, or t
  misc_feature (713)..(713): n is a, c, g, or t
  misc_feature (719)..(719): n is a, c, g, or t
  misc_feature (747)..(748): n is a, c, g, or t
  misc_feature (750)..(750): n is a, c, g, or t
  misc_feature (755)..(755): n is a, c, g, or t
  misc_feature (780)..(781): n is a, c, g, or t
  misc_feature (786)..(786): n is a, c, g, or t
  misc_feature (795)..(795): n is a, c, g, or t
  misc_feature (805)..(805): n is a, c, g, or t
  misc_feature (811)..(812): n is a, c, g, or t
  misc_feature (817)..(817): n is a, c, g, or t
  misc_feature (824)..(824): n is a, c, g, or t
  misc_feature (828)..(828): n is a, c, g, or t
  misc_feature (833)..(833): n is a, c, g, or t
  misc_feature (840)..(840): n is a, c, g, or t
  misc_feature (842)..(842): n is a, c, g, or t
  misc_feature (846)..(846): n is a, c, g, or t
  misc_feature (848)..(848): n is a, c, g, or t
  misc_feature (861)..(862): n is a, c, g, or t
  misc_feature (865)..(865): n is a, c, g, or t
  misc_feature (869)..(869): n is a, c, g, or t
  misc_feature (881)..(883): n is a, c, g, or t
  misc_feature (886)..(887): n is a, c, g, or t
  misc_feature (890)..(891): n is a, c, g, or t
  misc_feature (895)..(895): n is a, c, g, or t
  misc_feature (898)..(898): n is a, c, g, or t
  misc_feature (902)..(902): n is a, c, g, or t
  misc_feature (908)..(909): n is a, c, g, or t
  misc_feature (911)..(911): n is a, c, g, or t
  misc_feature (914)..(914): n is a, c, g, or t
  misc_feature (922)..(922): n is a, c, g, or t
  misc_feature (924)..(924): n is a, c, g, or t
  misc_feature (926)..(927): n is a, c, g, or t
  misc_feature (931)..(931): n is a, c, g, or t
  misc_feature (933)..(933): n is a, c, g, or t
  misc_feature (935)..(935): n is a, c, g, or t
  misc_feature (937)..(937): n is a, c, g, or t
  misc_feature (940)..(941): n is a, c, g, or t
  misc_feature (946)..(946): n is a, c, g, or t
  misc_feature (950)..(950): n is a, c, g, or t
  misc_feature (952)..(953): n is a, c, g, or t
  misc_feature (955)..(956): n is a, c, g, or t
  misc_feature (958)..(958): n is a, c, g, or t
  misc_feature (960)..(960): n is a, c, g, or t
  misc_feature (962)..(962): n is a, c, g, or t
  misc_feature (964)..(964): n is a, c, g, or t
  misc_feature (967)..(967): n is a, c, g, or t
  misc_feature (970)..(970): n is a, c, g, or t
  misc_feature (973)..(973): n is a, c, g, or t
  misc_feature (976)..(976): n is a, c, g, or t
  misc_feature (978)..(978): n is a, c, g, or t
  misc_feature (984)..(984): n is a, c, g, or t
  misc_feature (992)..(992): n is a, c, g, or t
  misc_feature (995)..(996): n is a, c, g, or t
  misc_feature (1001)..(1002): n is a, c, g, or t
  misc_feature (1004)..(1004): n is a, c, g, or t
  misc_feature (1009)..(1009): n is a, c, g, or t
  misc_feature (1011)..(1012): n is a, c, g, or t
  misc_feature (1016)..(1016): n is a, c, g, or t
ncaattcaacttntccctcctcctccctcttgatcaactggtttgtggttttcntccttataagctctgtgaaaaattcaggtcggggtcgaactcctctactccctgtgtggtgtatgagtctcgaccccagcatgctggcctgagctctcgtttcatctcgcttacaataaatcttcctcgtgtggttacagcangtcngtgtctgtgtcctactgggtgcgcgtctttcccgagacttgantggggggctcccttcagggtctttcntaatgttagantnnaattgatgatgtnaaggattgctaaaggttaggagatagcaaggcacactaagtngaatttagctganaaaagactgcctgcaaaacnncacacgtgtntntntnagctaactangcctgttagagattaggatgctnggatacaccagttgttcnccaggatgtccaganatatgcnccagacctgatttgctaccagccactaggcccntctccatatcnaaaacaggctctaactagctgatcagtggggcattactggatccatcnacagtnaggctggtgtgccataaaggttantttctctgaaaaaacatgtcnccactggcntatgacccggtgacgtngaacncctctatccaaaagggtccccagtgacngaaaacggtctgatgtnaacagagtcntaatattcaacccggcnacctntccccntaaaaagatgaccaacccattcaagttnnanaactngggttgggtgtctcatggctccacnnttaanaacaaaatntgtaatcggngagacnntaatngcgattntggnttccnccaaccnantctncnggcctctcctttnntcncccnaatctgtcttcnnnctnnctnntcgnggncggnggttcnntnccnaacctcantnannaacntntntnttnntctcngctncnngnngnancngncgnctnctntcncngggggnttctccgnttnnctctnntnttttncnnctcn

SEQ ID NO: 410 - DNA, 901 bp, Artificial Sequence; identical to SEQ ID NO: 401
  Description of Artificial Sequence: Note = Synthetic Construct
  misc_feature (22)..(22): n is a, c, g, or t
  misc_feature (30)..(30): n is a, c, g, or t
  misc_feature (150)..(150): n is a, c, g, or t
  misc_feature (203)..(203): n is a, c, g, or t
  misc_feature (283)..(283): n is a, c, g, or t
  misc_feature (285)..(285): n is a, c, g, or t
  misc_feature (287)..(287): n is a, c, g, or t
  misc_feature (319)..(319): n is a, c, g, or t
  misc_feature (364)..(364): n is a, c, g, or t
  misc_feature (429)..(429): n is a, c, g, or t
  misc_feature (456)..(456): n is a, c, g, or t
  misc_feature (469)..(469): n is a, c, g, or t
  misc_feature (472)..(472): n is a, c, g, or t
  misc_feature (494)..(494): n is a, c, g, or t
  misc_feature (504)..(504): n is a, c, g, or t
  misc_feature (543)..(543): n is a, c, g, or t
  misc_feature (568)..(568): n is a, c, g, or t
  misc_feature (588)..(588): n is a, c, g, or t
  misc_feature (618)..(618): n is a, c, g, or t
  misc_feature (623)..(623): n is a, c, g, or t
  misc_feature (634)..(634): n is a, c, g, or t
  misc_feature (636)..(636): n is a, c, g, or t
  misc_feature (650)..(650): n is a, c, g, or t
  misc_feature (698)..(699): n is a, c, g, or t
  misc_feature (722)..(722): n is a, c, g, or t
  misc_feature (725)..(726): n is a, c, g, or t
  misc_feature (730)..(730): n is a, c, g, or t
  misc_feature (733)..(733): n is a, c, g, or t
  misc_feature (738)..(739): n is a, c, g, or t
  misc_feature (763)..(763): n is a, c, g, or t
  misc_feature (774)..(774): n is a, c, g, or t
  misc_feature (779)..(779): n is a, c, g, or t
  misc_feature (783)..(783): n is a, c, g, or t
  misc_feature (786)..(786): n is a, c, g, or t
  misc_feature (792)..(792): n is a, c, g, or t
  misc_feature (801)..(801): n is a, c, g, or t
  misc_feature (809)..(809): n is a, c, g, or t
  misc_feature (820)..(820): n is a, c, g, or t
  misc_feature (825)..(826): n is a, c, g, or t
  misc_feature (833)..(833): n is a, c, g, or t
  misc_feature (841)..(841): n is a, c, g, or t
  misc_feature (864)..(864): n is a, c, g, or t
  misc_feature (877)..(877): n is a, c, g, or t
  misc_feature (882)..(883): n is a, c, g, or t

SEQ ID NO: 411 - DNA, 425 bp, Artificial Sequence
  Description of Artificial Sequence: Note = Synthetic Construct
caacagatacggatatttgcacatgcagcactcaaccagacgacgcgactgtcgttcggaaatgagcctcagatcatttctcgaaaactcaggccatgtagacttacgagtctagatacccagaatccctcttgtctagaatattagggtggagattcacagcctggaatgtcagaggataactgtaaatggaagccctgcctagccctgtagaaaaaaaattaattcaggcctggcaagatggtttagcaggttaaggtgcttgctgccaagcttgagttgcatctccagtctacgtggtagaaggaataaaccttgtaaagtaatagtacttgcaagttgcatgtcttctctgctaaatataaaatttaaaaaatactgaagggacattacctacaggtactcaatgaattgaaattctcaaa

SEQ ID NO: 412 - DNA, 206 bp, Artificial Sequence
  Description of Artificial Sequence: Note = Synthetic Construct
  misc_feature (146)..(146): n is a, c, g, or t
  misc_feature (193)..(193): n is a, c, g, or t
cattcccttatctgataaacagtgagccaaatctggtgagactttggctattttcctgctgctacccaagaaaaacagtctataaaacttggaggccccgttgagatggctcagtggttaagagcactgactactcagtggttaanaagtcccgggtttgattcccagcacctaatgaaagacccacctgtangtttggcaagcta

SEQ ID NO: 413 - DNA, 577 bp, Artificial Sequence
  Description of Artificial Sequence: Note = Synthetic Construct
  misc_feature (4)..(4): n is a, c, g, or t
  misc_feature (19)..(19): n is a, c, g, or t
  misc_feature (21)..(21): n is a, c, g, or t
  misc_feature (45)..(45): n is a, c, g, or t
  misc_feature (168)..(168): n is a, c, g, or t
  misc_feature (195)..(195): n is a, c, g, or t
  misc_feature (246)..(246): n is a, c, g, or t
  misc_feature (255)..(255): n is a, c, g, or t
  misc_feature (323)..(323): n is a, c, g, or t
  misc_feature (355)..(355): n is a, c, g, or t
  misc_feature (376)..(376): n is a, c, g, or t
  misc_feature (392)..(392): n is a, c, g, or t
  misc_feature (437)..(437): n is a, c, g, or t
  misc_feature (439)..(439): n is a, c, g, or t
  misc_feature (446)..(447): n is a, c, g, or t
  misc_feature (449)..(449): n is a, c, g, or t
  misc_feature (451)..(451): n is a, c, g, or t
  misc_feature (457)..(457): n is a, c, g, or t
  misc_feature (459)..(459): n is a, c, g, or t
  misc_feature (465)..(465): n is a, c, g, or t
  misc_feature (467)..(467): n is a, c, g, or t
  misc_feature (470)..(470): n is a, c, g, or t
  misc_feature (497)..(497): n is a, c, g, or t
  misc_feature (503)..(503): n is a, c, g, or t
  misc_feature (509)..(509): n is a, c, g, or t
  misc_feature (512)..(512): n is a, c, g, or t
  misc_feature (520)..(520): n is a, c, g, or t
  misc_feature (524)..(525): n is a, c, g, or t
  misc_feature (535)..(535): n is a, c, g, or t
  misc_feature (537)..(537): n is a, c, g, or t
  misc_feature (540)..(540): n is a, c, g, or t
  misc_feature (551)..(551): n is a, c, g, or t
  misc_feature (556)..(556): n is a, c, g, or t
  misc_feature (559)..(559): n is a, c, g, or t
  misc_feature (561)..(561): n is a, c, g, or t
  misc_feature (566)..(566): n is a, c, g, or t
  misc_feature (568)..(568): n is a, c, g, or t
cacncttcactggagcganancatctattgggaatacagttctanagacattctcacagaaaccggtcgggaaacccagatctaccaatgcaagtgacaccagccccaaactaggcgatccggaaatacaactaaagaagatcaacaacagatccccagcacgcaganaatacccacccaatcagaccaacgcantttacaactatacccagtaaacactttactttttccttgacacatcctatnccgctcgtnccctcgtccaccaaaaccagcgacgcggcccatcccaaaagttcccagtcgtttcataacctgtatgncgatgacgcgctggctggactcgagaagcccngggttaaacacgtgtggacanagttcatataaagagncagtccgctgtgaagttcgttatggcaaaacggcatccttcgttncnggcgctnnanantgccanangaagantntgngcagtctcctcatttagagagttgatnggtctnctccantcngatggtcngccnncaaccaatcnanttnaaaaaggcccngccgnccncntgacncngtgcagcta

SEQ ID NO: 414 - DNA, 193 bp, Artificial Sequence
  Description of Artificial Sequence: Note = Synthetic Construct
  misc_feature (102)..(102): n is a, c, g, or t
  misc_feature (110)..(110): n is a, c, g, or t
  misc_feature (116)..(116): n is a, c, g, or t
  misc_feature (176)..(176): n is a, c, g, or t
  misc_feature (191)..(191): n is a, c, g, or t
cattccattgaatccgatcgtactccaatttgttaaagacagggatatcagtggtccaggctctagttttgactcaacaatatcaccagctgaagcctatanagtacganccatanataaaataaaagattttatttagtctccagaaaaagggggaatgaaagaccccacctgtntgtttggcaagctanct

SEQ ID NO: 415 - DNA, 898 bp, Artificial Sequence
  Description of Artificial Sequence: Note = Synthetic Construct
  misc_feature (6)..(6): n is a, c, g, or t
  misc_feature (80)..(80): n is a, c, g, or t
  misc_feature (209)..(209): n is a, c, g, or t
  misc_feature (219)..(219): n is a, c, g, or t
  misc_feature (434)..(434): n is a, c, g, or t
  misc_feature (488)..(488): n is a, c, g, or t
  misc_feature (525)..(525): n is a, c, g, or t
  misc_feature (587)..(587): n is a, c, g, or t
  misc_feature (591)..(591): n is a, c, g, or t
  misc_feature (595)..(595): n is a, c, g, or t
  misc_feature (607)..(607): n is a, c, g, or t
  misc_feature (617)..(617): n is a, c, g, or t
  misc_feature (630)..(630): n is a, c, g, or t
  misc_feature (657)..(657): n is a, c, g, or t
  misc_feature (659)..(659): n is a, c, g, or t
  misc_feature (665)..(665): n is a, c, g, or t
  misc_feature (676)..(676): n is a, c, g, or t
  misc_feature (678)..(678): n is a, c, g, or t
  misc_feature (687)..(687): n is a, c, g, or t
  misc_feature (715)..(715): n is a, c, g, or t
  misc_feature (720)..(720): n is a, c, g, or t
  misc_feature (724)..(724): n is a, c, g, or t
  misc_feature (732)..(732): n is a, c, g, or t
  misc_feature (763)..(763): n is a, c, g, or t
  misc_feature (771)..(771): n is a, c, g, or t
  misc_feature (777)..(777): n is a, c, g, or t
  misc_feature (782)..(782): n is a, c, g, or t
  misc_feature (795)..(795): n is a, c, g, or t
  misc_feature (810)..(810): n is a, c, g, or t
  misc_feature (812)..(812): n is a, c, g, or t
  misc_feature (819)..(819): n is a, c, g, or t
  misc_feature (838)..(838): n is a, c, g, or t
  misc_feature (845)..(846): n is a, c, g, or t
  misc_feature (857)..(857): n is a, c, g, or t
  misc_feature (880)..(881): n is a, c, g, or t
  misc_feature (883)..(883): n is a, c, g, or t
  misc_feature (889)..(889): n is a, c, g, or t
cattcnattgaatcacacgtgtccatgccaggcttctgaatgtcctgaggccatctttatagctctgtcagtcttcaganctgttttatagcttgctaattattacatgcaacactacttacatgtcttgtgtatgtaaaagtacaggtacagtattgggctggagagaaagctcagtgcttaagaacgcttactgcgctatcagaganccacagtgtngaccccagtatccacatcaggtggctcacaaatgcctgtacgtccagctccaagacgtccaacatccctttccagcctctatgggcatgcatgtgcacacacacaaaataaataaggatcttaaaaaggcaaatgaaaatacagtatgacattatttaagccatttaagtctgcctccttcactggtttcttacctgagaagctggtatcagganatttgtactggaattctccctctgatgatggattgtctgtgtgtggcatgatanataaatatctggttgctgcctcctgctcctgacacanaatcctaaaatgctttaaatttttgaactaaggggtgtcaggaacatctttcttttactggncttnaacngggcactgaccnaatccctaanactgcccattccngaatgatcaaatactaaccgtcgccananggcccnaatccctgaancnctttgtganaaaatttttttacaatggaacgttggtnggtcngganattccaanaaaacgtccccgaaaaaaaaattacggaacnggaattcncccgcnctttnccggaaaaaaagnggaaacataaaactntnccattcncccttaattcccaaaaaancgaggcnncctgatatgcnttggtttccgggaaaaatttccnntncctttnccttcccta

SEQ ID NO: 416 - DNA, 940 bp, Artificial Sequence
  Description of Artificial Sequence: Note = Synthetic Construct
  misc_feature (37)..(37): n is a, c, g, or t
  misc_feature (101)..(101): n is a, c, g, or t
  misc_feature (242)..(242): n is a, c, g, or t
  misc_feature (270)..(270): n is a, c, g, or t
  misc_feature (364)..(364): n is a, c, g, or t
  misc_feature (482)..(482): n is a, c, g, or t
  misc_feature (493)..(493): n is a, c, g, or t
  misc_feature (501)..(501): n is a, c, g, or t
  misc_feature (503)..(503): n is a, c, g, or t
  misc_feature (522)..(522): n is a, c, g, or t
  misc_feature (536)..(536): n is a, c, g, or t
  misc_feature (576)..(576): n is a, c, g, or t
  misc_feature (589)..(589): n is a, c, g, or t
  misc_feature (603)..(603): n is a, c, g, or t
  misc_feature (611)..(611): n is a, c, g, or t
  misc_feature (681)..(681): n is a, c, g, or t
  misc_feature (686)..(686): n is a, c, g, or t
  misc_feature (701)..(702): n is a, c, g, or t
  misc_feature (707)..(707): n is a, c, g, or t
  misc_feature (717)..(717): n is a, c, g, or t
  misc_feature (721)..(721): n is a, c, g, or t
  misc_feature (724)..(724): n is a, c, g, or t
  misc_feature (732)..(732): n is a, c, g, or t
  misc_feature (736)..(736): n is a, c, g, or t
  misc_feature (739)..(739): n is a, c, g, or t
  misc_feature (742)..(742): n is a, c, g, or t
  misc_feature (744)..(744): n is a, c, g, or t
  misc_feature (769)..(769): n is a, c, g, or t
  misc_feature (776)..(776): n is a, c, g, or t
  misc_feature (782)..(782): n is a, c, g, or t
  misc_feature (794)..(794): n is a, c, g, or t
  misc_feature (798)..(799): n is a, c, g, or t
  misc_feature (822)..(822): n is a, c, g, or t
  misc_feature (825)..(825): n is a, c, g, or t
  misc_feature (844)..(844): n is a, c, g, or t
  misc_feature (847)..(847): n is a, c, g, or t
  misc_feature (870)..(871): n is a, c, g, or t
  misc_feature (892)..(892): n is a, c, g, or t
  misc_feature (901)..(901): n is a, c, g, or t
  misc_feature (917)..(917): n is a, c, g, or t
  misc_feature (933)..(933): n is a, c, g, or t
  misc_feature (936)..(936): n is a, c, g, or t
caattcaattgaatccgatattgacaacaagagaaanaataaaagcttcgtacctacctcctcagcaagcagggacttgctgagcccccttctatcacaanacttggttttgcctttgtcccatttgctttcctccatcacccgtattattcctgtgtgaaatctgccaattagcttgtttctcacaggcaagatgcagctgggtttgcttatttgttctttgtgatcaggtgtctacatanctctggctgtcctggaactcactatatngaccagttgaacgagagaccttgtctgaaaaaataaggtggagaagcaatagacaccgatagtgacactatttgtacggttttagtgctctganaatgtggataattttatatacatttgttttcttcaccacagggtttcttggtgttaccctggctggactggaactgttctgattgttacaaagacactaaaaccatgttacttgaaanacccacctgtnggttggcnanctaactgaagatcgtttcncatgattgaacaanatggattgcacgcaggttcccgggcgcttgggtggaaagntatccgctatgantgggcacaacaganaatcggtnctctgatccgccgtgttcccgctgtcacgcagggggcccggtcttttggtcaaaacaactgtccgggccngaatnaatgcagaaaaaganncggtntctggtggcncaanggngtccttgncatntcncantntcctgaacggaaggaaggctgtttnggcaatnccgggnggatcccgttcncctnnccgccaaaattctcctggggatnaanggggggtttcttttcggtnctncttcaaccacaaatcctaaaaannttcggtgaacggctttttganttgaaaaancgggcccccaattccnccggctcaggaatccnacngaac

SEQ ID NO: 417 - DNA, 799 bp, Artificial Sequence; identical to SEQ ID NO: 291
  Description of Artificial Sequence: Note = Synthetic Construct
  misc_feature (27)..(27): n is a, c, g, or t
  misc_feature (108)..(108): n is a, c, g, or t
  misc_feature (206)..(206): n is a, c, g, or t
  misc_feature (239)..(239): n is a, c, g, or t
  misc_feature (245)..(245): n is a, c, g, or t
  misc_feature (248)..(248): n is a, c, g, or t
  misc_feature (295)..(295): n is a, c, g, or t
  misc_feature (322)..(322): n is a, c, g, or t
  misc_feature (343)..(343): n is a, c, g, or t
  misc_feature (346)..(346): n is a, c, g, or t
  misc_feature (356)..(356): n is a, c, g, or t
  misc_feature (461)..(461): n is a, c, g, or t
  misc_feature (484)..(484): n is a, c, g, or t
  misc_feature (486)..(486): n is a, c, g, or t
  misc_feature (511)..(511): n is a, c, g, or t
  misc_feature (539)..(539): n is a, c, g, or t
  misc_feature (568)..(568): n is a, c, g, or t
  misc_feature (571)..(571): n is a, c, g, or t
  misc_feature (595)..(596): n is a, c, g, or t
  misc_feature (599)..(599): n is a, c, g, or t
  misc_feature (609)..(609): n is a, c, g, or t
  misc_feature (618)..(618): n is a, c, g, or t
  misc_feature (622)..(622): n is a, c, g, or t
  misc_feature (627)..(627): n is a, c, g, or t
  misc_feature (631)..(631): n is a, c, g, or t
  misc_feature (635)..(635): n is a, c, g, or t
  misc_feature (653)..(654): n is a, c, g, or t
  misc_feature (661)..(661): n is a, c, g, or t
  misc_feature (672)..(673): n is a, c, g, or t
  misc_feature (675)..(675): n is a, c, g, or t
  misc_feature (678)..(678): n is a, c, g, or t
  misc_feature (682)..(682): n is a, c, g, or t
  misc_feature (689)..(689): n is a, c, g, or t
  misc_feature (697)..(698): n is a, c, g, or t
  misc_feature (701)..(701): n is a, c, g, or t
  misc_feature (708)..(708): n is a, c, g, or t
  misc_feature (711)..(711): n is a, c, g, or t
  misc_feature (721)..(721): n is a, c, g, or t
  misc_feature (723)..(723): n is a, c, g, or t
  misc_feature (735)..(735): n is a, c, g, or t
  misc_feature (737)..(737): n is a, c, g, or t
  misc_feature (740)..(740): n is a, c, g, or t
  misc_feature (742)..(742): n is a, c, g, or t
  misc_feature (747)..(747): n is a, c, g, or t
  misc_feature (749)..(749): n is a, c, g, or t
  misc_feature (761)..(761): n is a, c, g, or t

SEQ ID NO: 418 - DNA, 1069 bp, Artificial Sequence
  Description of Artificial Sequence: Note = Synthetic Construct
  misc_feature (506)..(506): n is a, c, g, or t
  misc_feature (514)..(514): n is a, c, g, or t
  misc_feature (884)..(884): n is a, c, g, or t
ttctattttatttttttaatgtgcctgtggcgtgattgtatttatgtgttcacagtatgaaggtccaaagttgatgccaagtgcgttctcagtcattctccacttttaaactcttggacacacactctcccagcaatgactctccattttcatttactgaggcagggatgaactggagtcctcaactctgactaaagatccagccgagtttggggttggctttctgttttcctgtctacgttaagcagtgtgttggaatatacactgactaacatggaaagacctgggtttattctggcttagctacttgcttccagagagagcccatgaaaattggcctgtccaaaactccttttccctgcctctaagacaggcatgatactatctggcagcaggttattaccataggtaagtaaattacaatgggtaagtgcctggcacaggccagggtaagtagggcatgtatggaatgttaaacattacccttcatcctgaggtaatatgantgtagtcnacacaagcattcctggctgtctcacatatcccaatctttgtcttcctaggtgccccatgatgaaccttaagcccaagccagacctatggctcacaaggaacgacgtgggcaagctagggtataggtgctcagagactccaggggtagtcacacagacactgctccagggacaaccctccggatgtgagtatatgacttcctgatggtaacactgccatgatgtgatactcctcgtggcagcacacattcctcagtcagcttctgagcctcagggtcccagcagagcacagtggcaatgacctcattcttctcgtccctcccacccgtgatatacagcttgttgttgcagggtgcgatgccacagctggcntcgtcatggctgagctgtgtcaccagacaccagctgtcttccagagggctataagcgtagagtgctctcatggcaccaccaacaacatagatgtgatcctggaaactcactgcattgatgcatttagcctctactggcatggctgacttcaaaacccatttattggtggaaggcctctgccgaat

SEQ ID NO: 419 - DNA, 392 bp, Artificial Sequence
  Description of Artificial Sequence: Note = Synthetic Construct
  misc_feature (19)..(19): n is a, c, g, or t
  misc_feature (21)..(21): n is a, c, g, or t
  misc_feature (158)..(158): n is a, c, g, or t
gttaggccctctgagtccntnactacccgtcagcgggggtctttcacaccctttacctacccaccctgcatcccaacatgtcatgtggaaaagtcctcattttttatattgagaagggttttttgtttgtttgattaatttttgatttttcagtgaantcattttctttgtgtcaatacctttttctctacacttaccaggctgttgtaagaaataaactgagaaacatttgatctctcctcttcctccaccaagtgctgaccctcaggctgcaccaccaataaatagggacctgaagaaaggaatgggagttgtgtttatttaaaaaaagattagacagaaggaatacgtttggtggatgtgtattcaggtttggtggatgtgtattcagg

SEQ ID NO: 420 - DNA, 803 bp, Artificial Sequence
  Description of Artificial Sequence: Note = Synthetic Construct
  misc_feature (283)..(283): n is a, c, g, or t
  misc_feature (289)..(289): n is a, c, g, or t
  misc_feature (325)..(325): n is a, c, g, or t
  misc_feature (349)..(349): n is a, c, g, or t
  misc_feature (352)..(352): n is a, c, g, or t
  misc_feature (394)..(394): n is a, c, g, or t
  misc_feature (405)..(405): n is a, c, g, or t
  misc_feature (409)..(409): n is a, c, g, or t
  misc_feature (414)..(414): n is a, c, g, or t
  misc_feature (423)..(423): n is a, c, g, or t
  misc_feature (429)..(429): n is a, c, g, or t
  misc_feature (458)..(458): n is a, c, g, or t
  misc_feature (466)..(466): n is a, c, g, or t
  misc_feature (471)..(471): n is a, c, g, or t
  misc_feature (486)..(486): n is a, c, g, or t
  misc_feature (489)..(489): n is a, c, g, or t
  misc_feature (491)..(491): n is a, c, g, or t
  misc_feature (493)..(493): n is a, c, g, or t
  misc_feature (502)..(502): n is a, c, g, or t
  misc_feature (505)..(505): n is a, c, g, or t
  misc_feature (510)..(510): n is a, c, g, or t
  misc_feature (514)..(514): n is a, c, g, or t
  misc_feature (519)..(519): n is a, c, g, or t
  misc_feature (521)..(522): n is a, c, g, or t
  misc_feature (526)..(526): n is a, c, g, or t
  misc_feature (529)..(529): n is a, c, g, or t
  misc_feature (532)..(533): n is a, c, g, or t
  misc_feature (541)..(541): n is a, c, g, or t
  misc_feature (551)..(551): n is a, c, g, or t
  misc_feature (566)..(566): n is a, c, g, or t
  misc_feature (568)..(568): n is a, c, g, or t
  misc_feature (570)..(570): n is a, c, g, or t
  misc_feature (575)..(575): n is a, c, g, or t
  misc_feature (579)..(579): n is a, c, g, or t
  misc_feature (581)..(581): n is a, c, g, or t
  misc_feature (584)..(584): n is a, c, g, or t
  misc_feature (591)..(591): n is a, c, g, or t
  misc_feature (593)..(593): n is a, c, g, or t
  misc_feature (599)..(599): n is a, c, g, or t
  misc_feature (604)..(604): n is a, c, g, or t
  misc_feature (609)..(609): n is a, c, g, or t
  misc_feature (615)..(616): n is a, c, g, or t
  misc_feature (621)..(621): n is a, c, g, or t
  misc_feature (624)..(624): n is a, c, g, or t
  misc_feature (634)..(635): n is a, c, g, or t
  misc_feature (638)..(638): n is a, c, g, or t
  misc_feature (647)..(647): n is a, c, g, or t
  misc_feature (650)..(650): n is a, c, g, or t
  misc_feature (656)..(656): n is a, c, g, or t
  misc_feature (664)..(664): n is a, c, g, or t
  misc_feature (666)..(666): n is a, c, g, or t
  misc_feature (670)..(670): n is a, c, g, or t
  misc_feature (674)..(674): n is a, c, g, or t
  misc_feature (676)..(676): n is a, c, g, or t
  misc_feature (679)..(679): n is a, c, g, or t
  misc_feature (682)..(682): n is a, c, g, or t
  misc_feature (686)..(686): n is a, c, g, or t
  misc_feature (688)..(688): n is a, c, g, or t
  misc_feature (693)..(693): n is a, c, g, or t
  misc_feature (695)..(695): n is a, c, g, or t
  misc_feature (699)..(699): n is a, c, g, or t
  misc_feature (702)..(702): n is a, c, g, or t
  misc_feature (731)..(732): n is a, c, g, or t
  misc_feature (742)..(742): n is a, c, g, or t
  misc_feature (754)..(754): n is a, c, g, or t
  misc_feature (756)..(756): n is a, c, g, or t
  misc_feature (763)..(763): n is a, c, g, or t
  misc_feature (766)..(766): n is a, c, g, or t
  misc_feature (768)..(768): n is a, c, g, or t
  misc_feature (776)..(777): n is a, c, g, or t
  misc_feature (779)..(779): n is a, c, g, or t
  misc_feature (782)..(782): n is a, c, g, or t
  misc_feature (792)..(792): n is a, c, g, or t
  misc_feature (794)..(795): n is a, c, g, or t
cgatcctcagctagcttgccaacctacaggtggggtctttcaccctgtacctgttaagctcatctcacctccctgccattttctggatgaattctttgtcaaaccaatctcaagccgttggcaaaaatactctacagcacttcaaagtgaagtgcaatcatttttcttttctaccccaggaacacaaagattttccagcacaatgtagaactgacgagaaatggagcaggggaacatccagcacacgagcagctctgaggtgtgggtgtgttagctcaaactncacttnccataaagtagaggtgaggaggacagggtaacttanaggaggcagaaagaaaacaacagnatnatagttgaccctgggaaggggctctacgtgttgtgggtgctnccaaacccagntggncaatnaatgcactnctactncatggtggcttgaggaaagggctggagtnactaaagncgggntgaggagggtggatnatngngnctgcagatnggncctgnttgnaggtngnnctgntgnggnntgtggggnagacaggatngggtgtggggggggntngntgggntggnantgnctgtggngnccaggntgggntgggnctggcnngatgntgntggctgtggnntgntgggggctnggnttgaangtgtggcncngggnggcntnggntgngggnanggggnangggntgngtggggggggagtggtggggggtgggtgnnggtggggggncccttggggggntngggggtnggntnacgtggcnngngtnggggaactgngnngacgacgc

SEQ ID NO: 421 - DNA, 859 bp, Artificial Sequence
  Description of Artificial Sequence: Note = Synthetic Construct
  misc_feature (4)..(4): n is a, c, g, or t
  misc_feature (13)..(13): n is a, c, g, or t
  misc_feature (432)..(432): n is a, c, g, or t
  misc_feature (478)..(478): n is a, c, g, or t
  misc_feature (480)..(480): n is a, c, g, or t
  misc_feature (541)..(541): n is a, c, g, or t
  misc_feature (557)..(557): n is a, c, g, or t
  misc_feature (581)..(581): n is a, c, g, or t
  misc_feature (586)..(586): n is a, c, g, or t
  misc_feature (591)..(591): n is a, c, g, or t
  misc_feature (600)..(600): n is a, c, g, or t
  misc_feature (655)..(655): n is a, c, g, or t
  misc_feature (663)..(664): n is a, c, g, or t
  misc_feature (680)..(680): n is a, c, g, or t
  misc_feature (684)..(684): n is a, c, g, or t
  misc_feature (691)..(691): n is a, c, g, or t
  misc_feature (705)..(705): n is a, c, g, or t
  misc_feature (709)..(709): n is a, c, g, or t
  misc_feature (727)..(727): n is a, c, g, or t
  misc_feature (735)..(735): n is a, c, g, or t
  misc_feature (743)..(744): n is a, c, g, or t
  misc_feature (751)..(751): n is a, c, g, or t
  misc_feature (753)..(753): n is a, c, g, or t
  misc_feature (770)..(770): n is a, c, g, or t
  misc_feature (772)..(772): n is a, c, g, or t
  misc_feature (779)..(779): n is a, c, g, or t
  misc_feature (784)..(784): n is a, c, g, or t
  misc_feature (787)..(787): n is a, c, g, or t
  misc_feature (792)..(792): n is a, c, g, or t
  misc_feature (801)..(801): n is a, c, g, or t
  misc_feature (804)..(804): n is a, c, g, or t
  misc_feature (815)..(817): n is a, c, g, or t
  misc_feature (820)..(820): n is a, c, g, or t
  misc_feature (831)..(835): n is a, c, g, or t
  misc_feature (838)..(838): n is a, c, g, or t
  misc_feature (843)..(843): n is a, c, g, or t
  misc_feature (845)..(845): n is a, c, g, or t
  misc_feature (848)..(848): n is a, c, g, or t
  misc_feature (855)..(855): n is a, c, g, or t
  misc_feature (857)..(857): n is a, c, g, or t
  misc_feature (859)..(859): n is a, c, g, or t
tttncacagaatncaagccagaggctcaaaagtaaacctacacatcctgttcacaaaagcactgggcacaattgctagaggctagaagaagcccaagtatccacttaacaggtaaatgccacacgcctgcagtgcctttgctattcacctgtcagagggaagggaagcccgttcatgctgcagcatgggtgttctgcacagtgaagaatgaactatggtggctgtgctttccagttccgatgagtgggcatttaggaggcaaagagagagagagcacacagcagactgaagcaacctgtagacagcaaaagctcatccagtcagggctcacaatagccaacaatagagacgactaccgcagcctgattgaaagagggagcaaaaggcatcaagttggtgctcacaacatcccccatgagtctgctgtcggancagtagtcctgctggagttctgagtggagggtcctgggcagagcanancagtctccatggatgagcttcatagtctgttgccaatggttaccttctagctgttgtcaanagcttgtttttactgncaagatgtgttgctgttgtcaatncccanacaanggcccttanaggacaatatgagataggcatgggtgggcctgaaatggggggaaggagaggggtnaattgcannttggcaaggagggcanacancacttgntggctgctacactntatnggggaggggaccaaaggngccatgangaatggtnntgatggnanttgcttgagggggcgtngnaaaatanaaatnggnaaaangattgtttngcnttttttttaannngangggtatgaatnnnnntanacctngnggngggaaanancn

SEQ ID NO: 422 - DNA, 160 bp, Artificial Sequence
  Description of Artificial Sequence: Note = Synthetic Construct
  misc_feature (9)..(9): n is a, c, g, or t
  misc_feature (30)..(30): n is a, c, g, or t
  misc_feature (57)..(57): n is a, c, g, or t
  misc_feature (84)..(84): n is a, c, g, or t
  misc_feature (86)..(86): n is a, c, g, or t
  misc_feature (100)..(100): n is a, c, g, or t
  misc_feature (103)..(103): n is a, c, g, or t
  misc_feature (118)..(118): n is a, c, g, or t
  misc_feature (122)..(122): n is a, c, g, or t
  misc_feature (127)..(127): n is a, c, g, or t
  misc_feature (136)..(136): n is a, c, g, or t
  misc_feature (142)..(142): n is a, c, g, or t
  misc_feature (147)..(147): n is a, c, g, or t
  misc_feature (149)..(150): n is a, c, g, or t
cgatttctnagctaccttgccaacctacangtggggtctttcaccctgtgcctgttnagctcatctgacactggcctgccattntntggatgaattcttngtngaaccaatcttaagncggnggatnaaatactgntacagnagctnannagtgaaagcg

SEQ ID NO: 423 - DNA, 560 bp, Artificial Sequence
  Description of Artificial Sequence: Note = Synthetic Construct
  misc_feature (333)..(333): n is a, c, g, or t
  misc_feature (361)..(362): n is a, c, g, or t
  misc_feature (454)..(454): n is a, c, g, or t
  misc_feature (466)..(466): n is a, c, g, or t
  misc_feature (469)..(469): n is a, c, g, or t
  misc_feature (488)..(488): n is a, c, g, or t
  misc_feature (490)..(490): n is a, c, g, or t
  misc_feature (496)..(496): n is a, c, g, or t
  misc_feature (508)..(508): n is a, c, g, or t
  misc_feature (546)..(546): n is a, c, g, or t
  misc_feature (551)..(551): n is a, c, g, or t
  misc_feature (554)..(554): n is a, c, g, or t
  misc_feature (556)..(558): n is a, c, g, or t
ttcacagaaacctagggtgaagggtaaggctggggaagtaaggaatctgcaaatccatcgtgagtgcatacacgcagagtgtcctctgcaacatatctgtgcttactaaatgtgtcagttattctgaaataccttaaaaaataaaaacaccaagtctcaaaaccgcaccaagaaagagacagtaactttcccttgcacccaggcttcctttcagcaattgcagttgcttgtggtcaactgctgttgaaagattacatgaaatattccagagacaaatgatacatgcattgaaaattacatattagagtagattgattgaattgtgctttgatngccattgttaatcttactgtactcaggnncttgactagactttatgttatgcgtgtcatttatcctggacatggaccaccacatacatggaaaagcacaggggactgaccgagagtagcantgggccggctgntancacccactgcggatggatnangactgnctgccaaatatnctgggcggggtgctggatggaagccatagaaggcgtgnaatgnggntnnnct

SEQ ID NO: 424 - DNA, 862 bp, Artificial Sequence
  Description of Artificial Sequence: Note = Synthetic Construct
  misc_feature (9)..(9): n is a, c, g, or t
  misc_feature (12)..(13): n is a, c, g, or t
  misc_feature (34)..(34): n is a, c, g, or t
  misc_feature (46)..(46): n is a, c, g, or t
  misc_feature (48)..(48): n is a, c, g, or t
  misc_feature (55)..(55): n is a, c, g, or t
  misc_feature (63)..(63): n is a, c, g, or t
  misc_feature (65)..(65): n is a, c, g, or t
  misc_feature (80)..(80): n is a, c, g, or t
  misc_feature (88)..(88): n is a, c, g, or t
  misc_feature (91)..(91): n is a, c, g, or t
  misc_feature (102)..(103): n is a, c, g, or t
  misc_feature (106)..(106): n is a, c, g, or t
  misc_feature (109)..(109): n is a, c, g, or t
  misc_feature (111)..(111): n is a, c, g, or t
  misc_feature (117)..(117): n is a, c, g, or t
  misc_feature (121)..(121): n is a, c, g, or t
  misc_feature (126)..(126): n is a, c, g, or t
  misc_feature (135)..(135): n is a, c, g, or t
  misc_feature (139)..(139): n is a, c, g, or t
  misc_feature (148)..(148): n is a, c, g, or t
  misc_feature (158)..(158): n is a, c, g, or t
  misc_feature (168)..(169): n is a, c, g, or t
  misc_feature (171)..(171): n is a, c, g, or t
  misc_feature (173)..(173): n is a, c, g, or t
  misc_feature (185)..(185): n is a, c, g, or t
  misc_feature (190)..(190): n is a, c, g, or t
  misc_feature (214)..(214): n is a, c, g, or t
  misc_feature (218)..(218): n is a, c, g, or t
  misc_feature (224)..(224): n is a, c, g, or t
  misc_feature (230)..(230): n is a, c, g, or t
  misc_feature (235)..(235): n is a, c, g, or t
  misc_feature (237)..(238): n is a, c, g, or t
  misc_feature (242)..(242): n is a, c, g, or t
  misc_feature (250)..(250): n is a, c, g, or t
  misc_feature (253)..(253): n is a, c, g, or t
  misc_feature (260)..(260): n is a, c, g, or t
  misc_feature (267)..(267): n is a, c, g, or t
  misc_feature (269)..(269): n is a, c, g, or t
  misc_feature (294)..(294): n is a, c, g, or t
  misc_feature (298)..(298): n is a, c, g, or t
  misc_feature (300)..(300): n is a, c, g, or t
  misc_feature (336)..(336): n is a, c, g, or t
  misc_feature (349)..(350): n is a, c, g, or t
  misc_feature (352)..(352): n is a, c, g, or t
  misc_feature (361)..(361): n is a, c, g, or t
  misc_feature (395)..(395): n is a, c, g, or t
  misc_feature (399)..(399): n is a, c, g, or t
  misc_feature (404)..(404): n is a, c, g, or t
  misc_feature (413)..(414): n is a, c, g, or t
  misc_feature (431)..(431): n is a, c, g, or t
  misc_feature (435)..(435): n is a, c, g, or t
  misc_feature (455)..(455): n is a, c, g, or t
  misc_feature (476)..(476): n is a, c, g, or t
  misc_feature (482)..(482): n is a, c, g, or t
  misc_feature (493)..(493): n is a, c, g, or t
  misc_feature (533)..(533): n is a, c, g, or t
  misc_feature (586)..(586): n is a, c, g, or t
  misc_feature (860)..(860): n is a, c, g, or t
ccccccccncannccccacacacctcccccgccnccttcaccccancncagcccnagcccccncncccacatttccacancccaccgngcntctttcccagnncgnatntntccaancagntcccnccacatccnccancccccagtncacggggccnccccatcctnncngncccacaggccanctttncccctgtccccattccccaccctncctntcatgncccctnagtancnntcancagccacnctnccccttnatcccancnctgtgcacaccttttattcctgtgncccncncccaatgtctcccacctttctgttccatttttcccncatagttcccaanncnattctgggnaaaagcagccatcaaggcccactttatagtccanaatnctggncctgccttnnaatgtcctcctatattnagtnaccgcaccgcctttaaatcnaccatcatgcaaagtggcagnatgcanacaaattgtanaaaagctcttcgcctgagcagcactgtggatctcctagtnaagttggagtgtgtacactacaccccaatatcttagaaaattcccaagagaanacttcatcttttcctctataaatttgcaagagaataaaaggatggtaagacaattatgccaaattagacctttaatcaagagattacaaattataatgtctactacccttcctgaatctatgaagaaaattaaaaatacactataataatattcatagttgtttatttagagcatttgcttctcaactttaaatattagtcttttatttctttacgcccataatatcaggaaccagtgaaagaccccacctgtaggttggcaagctagctgagnat

SEQ ID NO: 425 - DNA, 640 bp, Artificial Sequence
  Description of Artificial Sequence: Note = Synthetic Construct
  misc_feature (4)..(5): n is a, c, g, or t
  misc_feature (7)..(7): n is a, c, g, or t
  misc_feature (9)..(9): n is a, c, g, or t
  misc_feature (14)..(14): n is a, c, g, or t
  misc_feature (16)..(16): n is a, c, g, or t
  misc_feature (19)..(19): n is a, c, g, or t
  misc_feature (25)..(25): n is a, c, g, or t
  misc_feature (31)..(31): n is a, c, g, or t
  misc_feature (33)..(33): n is a, c, g, or t
  misc_feature (39)..(39): n is a, c, g, or t
  misc_feature (42)..(42): n is a, c, g, or t
  misc_feature (45)..(45): n is a, c, g, or t
  misc_feature (48)..(48): n is a, c, g, or t
  misc_feature (50)..(50): n is a, c, g, or t
  misc_feature (57)..(57): n is a, c, g, or t
  misc_feature (59)..(59): n is a, c, g, or t
  misc_feature (64)..(65): n is a, c, g, or t
  misc_feature (67)..(67): n is a, c, g, or t
  misc_feature (71)..(71): n is a, c, g, or t
  misc_feature (73)..(73): n is a, c, g, or t
  misc_feature (75)..(76): n is a, c, g, or t
  misc_feature (88)..(88): n is a, c, g, or t
  misc_feature (90)..(91): n is a, c, g, or t
  misc_feature (103)..(106): n is a, c, g, or t
  misc_feature (109)..(109): n is a, c, g, or t
  misc_feature (114)..(115): n is a, c, g, or t
  misc_feature (123)..(123): n is a, c, g, or t
  misc_feature (129)..(129): n is a, c, g, or t
  misc_feature (133)..(134): n is a, c, g, or t
  misc_feature (141)..(141): n is a, c, g, or t
  misc_feature (143)..(143): n is a, c, g, or t
  misc_feature (146)..(146): n is a, c, g, or t
  misc_feature (157)..(157): n is a, c, g, or t
  misc_feature (159)..(161): n is a, c, g, or t
  misc_feature (166)..(166): n is a, c, g, or t
  misc_feature (171)..(172): n is a, c, g, or t
  misc_feature (176)..(179): n is a, c, g, or t
  misc_feature (183)..(183): n is a, c, g, or t
  misc_feature (189)..(189): n is a, c, g, or t
  misc_feature (198)..(198): n is a, c, g, or t
  misc_feature (202)..(202): n is a, c, g, or t
  misc_feature (207)..(207): n is a, c, g, or t
  misc_feature (211)..(211): n is a, c, g, or t
  misc_feature (214)..(214): n is a, c, g, or t
  misc_feature (221)..(223): n is a, c, g, or t
  misc_feature (230)..(230): n is a, c, g, or t
  misc_feature (232)..(232): n is a, c, g, or t
  misc_feature (239)..(242): n is a, c, g, or t
  misc_feature (244)..(244): n is a, c, g, or t
  misc_feature (246)..(246): n is a, c, g, or t
  misc_feature (253)..(253): n is a, c, g, or t
  misc_feature (258)..(258): n is a, c, g, or t
  misc_feature (261)..(261): n is a, c, g, or t
  misc_feature (264)..(264): n is a, c, g, or t
  misc_feature (271)..(271): n is a, c, g, or t
  misc_feature (275)..(276): n is a, c, g, or t
  misc_feature (286)..(286): n is a, c, g, or t
  misc_feature (293)..(293): n is a, c, g, or t
  misc_feature (295)..(296): n is a, c, g, or t
  misc_feature (306)..(306): n is a, c, g, or t
  misc_feature (308)..(308): n is a, c, g, or t
  misc_feature (310)..(311): n is a, c, g, or t
  misc_feature (316)..(317): n is a, c, g, or t
  misc_feature (320)..(321): n is a, c, g, or t
  misc_feature (327)..(327): n is a, c, g, or t
  misc_feature (330)..(331): n is a, c, g, or t
  misc_feature (339)..(339): n is a, c, g, or t
  misc_feature (341)..(341): n is a, c, g, or t
  misc_feature (345)..(345): n is a, c, g, or t
  misc_feature (347)..(348): n is a, c, g, or t
  misc_feature (352)..(352): n is a, c, g, or t
  misc_feature (354)..(354): n is a, c, g, or t
  misc_feature (356)..(356): n is a, c, g, or t
  misc_feature (363)..(363): n is a, c, g, or t
  misc_feature (365)..(365): n is a, c, g, or t
  misc_feature (368)..(368): n is a, c, g, or t
  misc_feature (373)..(373): n is a, c, g, or t
  misc_feature (377)..(378): n is a, c, g, or t
  misc_feature (382)..(382): n is a, c, g, or t
  misc_feature (389)..(389): n is a, c, g, or t
  misc_feature (392)..(393): n is a, c, g, or t
  misc_feature (397)..(397): n is a, c, g, or t
  misc_feature (400)..(400): n is a, c, g, or t
  misc_feature (404)..(405): n is a, c, g, or t
  misc_feature (411)..(411): n is a, c, g, or t
  misc_feature (414)..(414): n is a, c, g, or t
  misc_feature (416)..(416): n is a, c, g, or t
  misc_feature (418)..(418): n is a, c, g, or t
  misc_feature (420)..(420): n is a, c, g, or t
  misc_feature (422)..(422): n is a, c, g, or t
  misc_feature (424)..(424): n is a, c, g, or t
  misc_feature (430)..(431): n is a, c, g, or t
  misc_feature (439)..(439): n is a, c, g, or t
  misc_feature (442)..(444): n is a, c, g, or t
  misc_feature (447)..(447): n is a, c, g, or t
  misc_feature (449)..(449): n is a, c, g, or t
  misc_feature (468)..(468): n is a, c, g, or t
  misc_feature (473)..(474): n is a, c, g, or t
  misc_feature (477)..(477): n is a, c, g, or t
  misc_feature (479)..(479): n is a, c, g, or t
  misc_feature (481)..(481): n is a, c, g, or t
  misc_feature (483)..(483): n is a, c, g, or t
  misc_feature (494)..(494): n is a, c, g, or t
  misc_feature (500)..(500): n is a, c, g, or t
  misc_feature (504)..(505): n is a, c, g, or t
  misc_feature (526)..(526): n is a, c, g, or t
  misc_feature (531)..(531): n is a, c, g, or t
  misc_feature (540)..(541): n is a, c, g, or t
  misc_feature (555)..(555): n is a, c, g, or t
  misc_feature (569)..(569): n is a, c, g, or t
  misc_feature (577)..(577): n is a, c, g, or t
  misc_feature (588)..(588): n is a, c, g, or t
  misc_feature (595)..(595): n is a, c, g, or t
  misc_feature (604)..(604): n is a, c, g, or t
  misc_feature (614)..(614): n is a, c, g, or t
  misc_feature (633)..(633): n is a, c, g, or t
  misc_feature (639)..(639): n is a, c, g, or t
gggnntnanggagncncgnggcgcncgggcntngcccgntancgnggngngcggggngnggaanntnaggncngnnaacagaggcggngnngcggcgctgggnnnnggnccggnnggcccggngggtanaagnngaagtgntnagnggtggggaggnannngacgntgggnncgannnncgcnggggangtgaagccngccngtgcngggnagngggcggnnntgggggngngggccannnncngnatgaggngatgntgnggntgggcgnaggnnaggcgggcgngtggcgngnngcggtggggngngnnggaannganntggcgngcnnccgagggngngatncnncgcncngnggagggncnggngatgngtcnnaganggtcggnggnnggcnggncagnncgtgcngtnangncntngngatcanngagggtgnccnnnggnangagtctaggggcggccctntcgtnnatncnangngggccgattcncgcatncgcnnataatcatattccatagttgnttatntagagcatnngcttgtcacctttnaatattagtctttnatttcttnacgcccataanatcaggnaccagtcgnagaccccacntgtaggtttggcaagggtngcgagna

SEQ ID NO: 426 - DNA, 827 bp, Artificial Sequence
  Description of Artificial Sequence: Note = Synthetic Construct
  misc_feature (3)..(3): n is a, c, g, or t
  misc_feature (9)..(9): n is a, c, g, or t
  misc_feature (11)..(11): n is a, c, g, or t
  misc_feature (14)..(14): n is a, c, g, or t
  misc_feature (18)..(18): n is a, c, g, or t
  misc_feature (21)..(22): n is a, c, g, or t
  misc_feature (24)..(24): n is a, c, g, or t
  misc_feature (32)..(32): n is a, c, g, or t
  misc_feature (39)..(40): n is a, c, g, or t
  misc_feature (53)..(54): n is a, c, g, or t
  misc_feature (56)..(56): n is a, c, g, or t
  misc_feature (60)..(60): n is a, c, g, or t
  misc_feature (74)..(74): n is a, c, g, or t
  misc_feature (85)..(85): n is a, c, g, or t
  misc_feature (91)..(91): n is a, c, g, or t
  misc_feature (102)..(102): n is a, c, g, or t
  misc_feature (114)..(114): n is a, c, g, or t
  misc_feature (123)..(123): n is a, c, g, or t
  misc_feature (125)..(125): n is a, c, g, or t
  misc_feature (177)..(177): n is a, c, g, or t
  misc_feature (202)..(202): n is a, c, g, or t
  misc_feature (391)..(391): n is a, c, g, or t
tanaaagangncanaaangcnncnttcagagncccaaanntattttgtgtgtnntnaagnctgcaaaaatgggnagtgttttgtnagtatntaagcagattnggtatattcagncggccaaananacattagactctttgtccattgttggctttaaaaattgtagcttgtacttcnctatccagtaaacttaattacttangctgaatagataactcgattctgtagaaaactacaggtaaaacatctattattttataaaatcgagagaaaaaggccaggtaggtgcacacctttaagcccagcacttgggaggcagaggcaggtcacctgctctacagggtgagctttaggtcatccaggaatacacagagcaaccctgactcagaancaaacccaaaaaaaaaaaaaaaaaaggaacaaattgtaagaagaggaagaaaggcatagtgtgtctgtaaataagcctgaaatctctcagtgggtaagataaggccgagtgtggtgtgatttaatgtctgagtgactgaactagctcagagtcaggacagtgctggagcttggtagtagacccagcagcagtggagctagcttagtgtgagaaagtgctggtgtttagtagtagatgtaggagctagtaccacgtgtgaatttgctcaaccactcattcattatttgtgcagtaaatattgttttctaacctgacttttaccataaatacaactagttcttctttaggagccctggttagactatttactgtggtataagctatatactgaagttagtgtgaaagaccccacctgtaggtttggcaagctagctag

SEQ ID NO: 427 - DNA, 918 bp, Artificial Sequence
  Description of Artificial Sequence: Note = Synthetic Construct
  misc_feature (19)..(19): n is a, c, g, or t
  misc_feature (23)..(25): n is a, c, g, or t
  misc_feature (29)..(29): n is a, c, g, or t
  misc_feature (38)..(39): n is a, c, g, or t
  misc_feature (46)..(46): n is a, c, g, or t
  misc_feature (48)..(48): n is a, c, g, or t
  misc_feature (60)..(60): n is a, c, g, or t
  misc_feature (62)..(62): n is a, c, g, or t
  misc_feature (66)..(66): n is a, c, g, or t
  misc_feature (69)..(70): n is a, c, g, or t
  misc_feature (80)..(80): n is a, c, g, or t
  misc_feature (82)..(84): n is a, c, g, or t
  misc_feature (89)..(89): n is a, c, g, or t
  misc_feature (99)..(99): n is a, c, g, or t
  misc_feature (105)..(105): n is a, c, g, or t
  misc_feature (107)..(107): n is a, c, g, or t
  misc_feature (111)..(112): n is a, c, g, or t
  misc_feature (132)..(132): n is a, c, g, or t
  misc_feature (138)..(140): n is a, c, g, or t
  misc_feature (142)..(142): n is a, c, g, or t
  misc_feature (156)..(156): n is a, c, g, or t
  misc_feature (161)..(161): n is a, c, g, or t
  misc_feature (164)..(164): n is a, c, g, or t
  misc_feature (170)..(170): n is a, c, g, or t
  misc_feature (196)..(196): n is a, c, g, or t
  misc_feature (210)..(210): n is a, c, g, or t
  misc_feature (213)..(213): n is a, c, g, or t
  misc_feature (231)..(231): n is a, c, g, or t
  misc_feature (257)..(257): n is a, c, g, or t
  misc_feature (260)..(260): n is a, c, g, or t
  misc_feature (272)..(272): n is a, c, g, or t
  misc_feature (314)..(314): n is a, c, g, or t
  misc_feature (349)..(349): n is a, c, g, or t
  misc_feature (353)..(353): n is a, c, g, or t
  misc_feature (355)..(355): n is a, c, g, or t
  misc_feature (387)..(387): n is a, c, g, or t
  misc_feature (460)..(460): n is a, c, g, or t
  misc_feature (542)..(542): n is a, c, g, or t
  misc_feature (550)..(550): n is a, c, g, or t
  misc_feature (554)..(554): n is a, c, g, or t
  misc_feature (587)..(587): n is a, c, g, or t
  misc_feature (646)..(646): n is a, c, g, or t
  misc_feature (659)..(659): n is a, c, g, or t
  misc_feature (673)..(673): n is a, c, g, or t
  misc_feature (675)..(675): n is a, c, g, or t
  misc_feature (685)..(685): n is a, c, g, or t
  misc_feature (706)..(706): n is a, c, g, or t
  misc_feature (751)..(751): n is a, c, g, or t
  misc_feature (781)..(781): n is a, c, g, or t
  misc_feature (816)..(816): n is a, c, g, or t
  misc_feature (897)..(897): n is a, c, g, or t
  misc_feature (900)..(900): n is a, c, g, or t
  misc_feature (908)..(908): n is a, c, g, or t
  misc_feature (915)..(915): n is a, c, g, or t
accggaaccccgttttttnttgnnngggntttaacccnnatttggngnccggccccggtncngggnttnntggaaaatgncnnnctcgntggccttccnattaanangccnnggggaagcccgtctcccggnccccannncnattaggaaccaccntcgcnggncttggnacccatttaggggtggcccttccggncggcttcggaaggncgncggtagttgttgttgccnaccgttaagacggtctccgggcgtcnccnggcttccccggnccggttggtttgggcccctaacaccgccgactccggccattncaaagccgcgcgctcgggcttccacggggcccccntgcnanctgggcgttgcgttctcgtttcacgggcgagnaggcttggcaaaaagacgaagccactttgtccaaggtcatgcagttggtaagtggaagcgccccaagcattgnaaccccaggtcccggccccgcttcccgaagccccggcgtttcccaccccttcctttgcccgctgcccgccttccttgcgggnaggggagnttgntcaaaaaggggcgtgtcgacaggcaagttgggntccaggttgggcccgacccactaacccgactcgttgccctggggctttacccccccccntttcctttttggnctttggtttctccncntgtgaaatgnaggtagtgccagccctgcctncctcagaggcgcgtgcggagcatcagagatccatagtgcatgtgnaattgctctgtaaatatccctgtgcgaagnacatggaaggtgctgctttaaaggatggaaggagncagagaggggcggggtggggaagactagagcaatcacagaggaaggacgaacatgagtgggtgttcttgaaagaccccacnatnggttttcnaagcaanggg

SEQ ID NO: 428 - DNA, 900 bp, Artificial Sequence
  Description of Artificial Sequence: Note = Synthetic Construct
  misc_feature (6)..(6): n is a, c, g, or t
  misc_feature (11)..(12): n is a, c, g, or t
  misc_feature (21)..(21): n is a, c, g, or t
  misc_feature (79)..(79): n is a, c, g, or t
  misc_feature (101)..(102): n is a, c, g, or t
  misc_feature (118)..(118): n is a, c, g, or t
  misc_feature (177)..(177): n is a, c, g, or t
  misc_feature (244)..(245): n is a, c, g, or t
  misc_feature (254)..(254): n is a, c, g, or t
  misc_feature (258)..(258): n is a, c, g, or t
  misc_feature (272)..(272): n is a, c, g, or t
  misc_feature (312)..(312): n is a, c, g, or t
  misc_feature (327)..(327): n is a, c, g, or t
  misc_feature (331)..(331): n is a, c, g, or t
  misc_feature (335)..(335): n is a, c, g, or t
  misc_feature (352)..(352): n is a, c, g, or t
  misc_feature (375)..(375): n is a, c, g, or t
  misc_feature (377)..(377): n is a, c, g, or t
  misc_feature (382)..(382): n is a, c, g, or t
  misc_feature (384)..(385): n is a, c, g, or t
  misc_feature (397)..(398): n is a, c, g, or t
  misc_feature (432)..(432): n is a, c, g, or t
  misc_feature (450)..(450): n is a, c, g, or t
  misc_feature (509)..(509): n is a, c, g, or t
  misc_feature (527)..(527): n is a, c, g, or t
  misc_feature (530)..(530): n is a, c, g, or t
  misc_feature (544)..(544): n is a, c, g, or t
  misc_feature (569)..(570): n is a, c, g, or t
  misc_feature (573)..(573): n is a, c, g, or t
  misc_feature (585)..(585): n is a, c, g, or t
  misc_feature (594)..(594): n is a, c, g, or t
  misc_feature (596)..(596): n is a, c, g, or t
  misc_feature (612)..(613): n is a, c, g, or t
  misc_feature (652)..(652): n is a, c, g, or t
  misc_feature (659)..(659): n is a, c, g, or t
  misc_feature (669)..(669): n is a, c, g, or t
  misc_feature (711)..(711): n is a, c, g, or t
  misc_feature (735)..(735): n is a, c, g, or t
  misc_feature (738)..(738): n is a, c, g, or t
  misc_feature (742)..(742): n is a, c, g, or t
  misc_feature (759)..(759): n is a, c, g, or t
  misc_feature (777)..(777): n is a, c, g, or t
  misc_feature (780)..(780): n is a, c, g, or t
  misc_feature (789)..(789): n is a, c, g, or t
  misc_feature (799)..(799): n is a, c, g, or t
  misc_feature (801)..(801): n is a, c, g, or t
  misc_feature (810)..(812): n is a, c, g, or t
  misc_feature (827)..(827): n is a, c, g, or t
  misc_feature (829)..(830): n is a, c, g, or t
  misc_feature (833)..(834): n is a, c, g, or t
  misc_feature (839)..(844): n is a, c, g, or t
  misc_feature (852)..(852): n is a, c, g, or t
  misc_feature (855)..(855): n is a, c, g, or t
  misc_feature (858)..(858): n is a, c, g, or t
  misc_feature (860)..(861): n is a, c, g, or t
  misc_feature (873)..(873): n is a, c, g, or t
  misc_feature (878)..(878): n is a, c, g, or t
  misc_feature (880)..(880): n is a, c, g, or t
  misc_feature (883)..(885): n is a, c, g, or t
  misc_feature (888)..(888): n is a, c, g, or t
  misc_feature (891)..(894): n is a, c, g, or t
  misc_feature (896)..(896): n is a, c, g, or t
  misc_feature (898)..(898): n is a, c, g, or t
attacnctttnnacaaggccnggacgagactcagtggattctgggaatcatggcctttgtgtcacagaagatgccctgncaggcgccttcagggggtgttnnggggatggggggcacngcggtcacagggtcactgttaaggaagttggagctggatgggaatccagctgattctgnccctccctgctctgggaaagtgctctgccgcaaatgtcttccttgcctcactccctatgtgcctatnncaccaaggntgtnaccaaaaggagctnggggtattttagagctgatggggaacttctactttcttgnaagggcaaagaatantcgntcgntgtgccccacctgcttnagatctaggaggaaaatctgggnanctccngnntttggggccctnngctcacacaaatgccaacttctggtccccacccnacgggtgatttaggccanttacttagatccacgttaatgaagtttttctgttgcctaaattagttcacagggaactnagccttgggaagaaaaanaanctaagaggatttgntgaaaggacacaaggaagttatgtnnggnatgtttcaagancaagggcangnactttagggttcaaanngggggttttttactcccatcccaaaaatactggaatggnttctttncccaggttgnaggggaccctcccaaaagcataaaaagggggggtgttttagngttgaaaaaaggcccccaaaagcnctnacanccaataatgggggaatntggaccccttaaattgtnaanggccccaanaaaatggggncngggcccttnnncccaaaattcaatgntnnttnnccccnnnnnnaaaaaaanttnaangnnccccttttaaanaaatntnttnnnggnctnnnnanangt

SEQ ID NO: 429 - DNA, 22 bp, Artificial Sequence
  Description of Artificial Sequence: Note = Synthetic Construct
cttccaggtaccaatggggatc

SEQ ID NO: 430 - DNA, 22 bp, Artificial Sequence
  Description of Artificial Sequence: Note = Synthetic Construct
tttggttcactgatggttgctg

SEQ ID NO: 431 - DNA, 15 bp, Artificial Sequence
  Description of Artificial Sequence: Note = Synthetic Construct
aacaagtcaaatgct

SEQ ID NO: 432 - DNA, 20 bp, Artificial Sequence
  Description of Artificial Sequence: Note = Synthetic Construct
aacaagtcaaatgctttata

SEQ ID NO: 433 - DNA, 15 bp, Artificial Sequence
  Description of Artificial Sequence: Note = Synthetic Construct
gtcaaatgctttata

SEQ ID NO: 434 - DNA, 15 bp, Artificial Sequence
  Description of Artificial Sequence: Note = Synthetic Construct
ttatatatttgagtt

SEQ ID NO: 435 - DNA, 20 bp, Artificial Sequence
  Description of Artificial Sequence: Note = Synthetic Construct
ttatatatttgagttaggga

SEQ ID NO: 436 - DNA, 23 bp, Artificial Sequence
  Description of Artificial Sequence: Note = Synthetic Construct
tttgagttagggaacatgtatat

SEQ ID NO: 437 - DNA, 24 bp, Artificial Sequence
  Description of Artificial Sequence: Note = Synthetic Construct
catgtatatgtcaaaaataaaaat

SEQ ID NO: 438 - DNA, 20 bp, Artificial Sequence
  Description of Artificial Sequence: Note = Synthetic Construct
tgcacattgaaacccttatg

SEQ ID NO: 439 - DNA, 19 bp, Artificial Sequence
  Description of Artificial Sequence: Note = Synthetic Construct
ttccacgtttatctatttt

SEQ ID NO: 440 - DNA, 21 bp, Artificial Sequence
  Description of Artificial Sequence: Note = Synthetic Construct
ggaaacgttaatgacagaaac

SEQ ID NO: 441 - DNA, 15 bp, Artificial Sequence
  Description of Artificial Sequence: Note = Synthetic Construct
aaaggcggacaaggg

SEQ ID NO: 442 - DNA, 20 bp, Artificial Sequence
  Description of Artificial Sequence: Note = Synthetic Construct
  misc_feature (6)..(6): n is a, c, g, or t
  misc_feature (10)..(10): n is a, c, g, or t
  misc_feature (15)..(15): n is a, c, g, or t
cttccngacnccccnaagcc

SEQ ID NO: 443 - DNA, 14 bp, Artificial Sequence
  Description of Artificial Sequence: Note = Synthetic Construct
  misc_feature (5)..(5): n is a, c, g, or t
cgaancggaagggc

SEQ ID NO: 444 - DNA, 11 bp, Artificial Sequence
  Description of Artificial Sequence: Note = Synthetic Construct
gcccgcccgaa

SEQ ID NO: 445 - DNA, 19 bp, Artificial Sequence
  Description of Artificial Sequence: Note = Synthetic Construct
ggccgactctctgcccgcc

SEQ ID NO: 446 - DNA, 18 bp, Artificial Sequence
  Description of Artificial Sequence: Note = Synthetic Construct
cccggaaagaggacagcg

SEQ ID NO: 447 - DNA, 14 bp, Artificial Sequence
  Description of Artificial Sequence: Note = Synthetic Construct
ggttgggccaaaaa

SEQ ID NO: 448 - DNA, 19 bp, Artificial Sequence
  Description of Artificial Sequence: Note = Synthetic Construct
  misc_feature (5)..(5): n is a, c, g, or t
ttaanaaaccgttcacccc

SEQ ID NO: 449 - DNA, 20 bp, Artificial Sequence
  Description of Artificial Sequence: Note = Synthetic Construct
aaccggtggtttgttgccgg

SEQ ID NO: 450 - DNA, 15 bp, Artificial Sequence
  Description of Artificial Sequence: Note = Synthetic Construct
gataactcactgctg

SEQ ID NO: 451 - DNA, 25 bp, Artificial Sequence
  Description of Artificial Sequence: Note = Synthetic Construct
cttctcttgaacacacctcctgggg

SEQ ID NO: 452 - DNA, 20 bp, Artificial Sequence
  Description of Artificial Sequence: Note = Synthetic Construct
gcgaaaggccctaacaatag

1-15. (canceled)

16. A method of reducing or inhibiting a viral infection in a subject, comprising administering to the subject an amount of a composition that inhibits expression or functioning of a gene product encoded by a gene comprising the nucleic acid set forth in SEQ ID NO: 65, SEQ ID NO: 211, SEQ ID NO: 212, SEQ ID NO: 213, SEQ ID NO: 214, SEQ ID NO: 215, SEQ ID NO: 216, SEQ ID NO: 217, SEQ ID NO: 218, SEQ ID NO: 219, SEQ ID NO: 220, SEQ ID NO: 221, SEQ ID NO: 222, SEQ ID NO: 223, SEQ ID NO: 224, SEQ ID NO: 225, SEQ ID NO: 226, SEQ ID NO: 227, SEQ ID NO: 228, SEQ ID NO: 229, SEQ ID NO: 230, SEQ ID NO:231, SEQ ID NO: 232, SEQ ID NO: 233, SEQ ID NO: 234 SEQ ID NO: 235, SEQ ID NO: 236, SEQ ID NO: 237, SEQ ID NO: 238, SEQ ID NO: 239, SEQ ID NO: 240, SEQ ID NO: 241, SEQ ID NO: 242, SEQ ID NO: 243, SEQ ID NO: 244, SEQ ID NO: 245, SEQ ID NO:246, SEQ ID NO: 247, SEQ ID NO: 248, SEQ ID NO: 249, SEQ ID NO: 250, SEQ ID NO: 251, SEQ ID NO: 252, SEQ ID NO: 253, SEQ ID NO: 254, SEQ ID NO:255, SEQ ID NO: 256, SEQ ID NO: 257, SEQ ID NO: 258, SEQ ID NO: 259, SEQ ID NO: 260, SEQ ID NO: 261, SEQ ID NO: 262, SEQ ID NO: 263, SEQ ID NO:264, SEQ ID NO: 265, SEQ ID NO: 266, SEQ ID NO: 267, SEQ ID NO: 268, SEQ ID NO: 269, SEQ ID NO: 270, SEQ ID NO: 271, SEQ ID NO: 272, SEQ ID NO: 273, SEQ ID NO: 274 SEQ ID NO: 275, SEQ ID NO: 276, SEQ ID NO: 277, SEQ ID NO: 278, SEQ ID NO: 279, SEQ ID NO: 280, SEQ ID NO: 281, SEQ ID NO: 282, SEQ ID NO: 283, SEQ ID NO: 284, SEQ ID NO: 285, SEQ ID NO: 286, SEQ ID NO: 287, SEQ ID NO: 288, SEQ ID NO: 289, SEQ ID NO: 290, SEQ ID NO: 291, SEQ ID NO: 292, SEQ ID NO: 293, SEQ ID NO: 294, SEQ ID NO:295, SEQ ID NO: 296, SEQ ID NO: 297, SEQ ID NO: 298, SEQ ID NO 299, SEQ ID NO: 300, SEQ ID NO: 301, SEQ ID NO: 302, SEQ ID NO: 303, SEQ ID NO:304, SEQ ID NO: 305, SEQ ID NO: 306, SEQ ID NO: 307, SEQ ID NO: 308, SEQ ID NO: 309, SEQ ID NO: 310, SEQ ID NO: 311, SEQ ID NO: 312, SEQ ID NO: 313, SEQ ID NO: 314 SEQ ID NO: 315, SEQ ID NO: 316, SEQ ID NO: 317, SEQ ID NO: 318, SEQ ID NO: 319, SEQ ID NO: 320, SEQ ID NO: 321, SEQ ID NO: 322, SEQ ID NO: 323, SEQ ID NO: 324, SEQ ID NO: 325, SEQ ID NO: 326, SEQ ID NO: 327, SEQ ID NO: 328, SEQ ID NO: 329, SEQ ID NO: 330, SEQ ID NO: 331, SEQ ID NO: 332, SEQ ID NO: 333, SEQ ID NO: 334, SEQ ID NO:335, SEQ ID NO: 336, SEQ ID NO: 337, SEQ ID NO: 338, SEQ ID NO: 339, SEQ ID NO: 340, SEQ ID NO: 341, SEQ ID NO: 342, SEQ ID NO: 343, SEQ ID NO:344, SEQ ID NO: 345, SEQ ID NO: 346, SEQ ID NO: 347, SEQ ID NO: 348, SEQ ID NO: 349, SEQ ID NO: 350, SEQ ID NO: 351, SEQ ID NO: 352, SEQ ID NO: 353, SEQ ID NO: 354 SEQ ID NO: 355, SEQ ID NO: 356, SEQ ID NO: 357, SEQ ID NO: 358, SEQ ID NO: 359, SEQ ID NO: 360, SEQ ID NO: 361, SEQ ID NO: 362, SEQ ID NO: 363, SEQ ID NO: 364, SEQ ID NO: 365, SEQ ID NO: 366, SEQ ID NO: 367, SEQ ID NO: 368, SEQ ID NO: 369, SEQ ID NO: 370, SEQ ID NO: 371, SEQ ID NO: 372, SEQ ID NO: 373, SEQ ID NO: 374, SEQ ID NO:375, SEQ ID NO: 376, SEQ ID NO: 377, SEQ ID NO: 378, SEQ ID NO: 379, SEQ ID NO: 380, SEQ ID NO: 381, SEQ ID NO: 382, SEQ ID NO 383, SEQ ID NO:384, SEQ ID NO: 385, SEQ ID NO: 386, SEQ ID NO: 387, SEQ ID NO: 388, SEQ ID NO: 389, SEQ ID NO: 390, SEQ ID NO: 391, SEQ ID NO: 392, SEQ ID NO: 393, SEQ ID NO: 394 SEQ ID NO: 395, SEQ ID NO: 396, SEQ ID NO: 397, SEQ ID NO: 398, SEQ ID NO: 399, SEQ ID NO: 400, SEQ ID NO: 401, SEQ ID NO: 402, SEQ ID NO: 403, SEQ ID NO: 404, SEQ ID NO: 405, SEQ ID NO: 406, SEQ ID NO: 407, SEQ ID NO: 408, SEQ ID NO: 409, SEQ ID NO: 410, SEQ ID NO: 411, SEQ ID NO: 412, SEQ ID NO: 413, SEQ ID NO: 414, SEQ ID NO:415, SEQ ID NO: 416, SEQ ID NO: 417, 418, SEQ ID NO: 419, SEQ ID NO: 420, SEQ ID NO: 421, SEQ ID NO: 422, SEQ ID NO: 423, SEQ ID NO: 424, SEQ ID NO:425, SEQ ID NO: 426, SEQ ID NO: 427, SEQ ID NO: 428 or a homolog thereof, thereby treating the viral infection.

17-28. (canceled)

29. A method of screening a compound for effectiveness in treating a viral infection, comprising administering the compound to a cell containing a cellular gene functionally encoding a gene product necessary for reproduction of the virus in the cell but not necessary for survival of the cell and detecting the level of the gene product produced, a decrease or elimination of the gene product indicating a compound effective for treating the viral infection.

30. The method of claim 29, wherein the cellular gene comprises the nucleic acid set forth in SEQ ID NO: 65, SEQ ID NO: 211, SEQ ID NO: 212, SEQ ID NO: 213, SEQ ID NO: 214, SEQ ID NO: 215, SEQ ID NO: 216, SEQ ID NO: 217, SEQ ID NO: 218, SEQ ID NO: 219, SEQ ID NO: 220, SEQ ID NO: 221, SEQ ID NO: 222, SEQ ID NO: 223, SEQ ID NO: 224, SEQ ID NO: 225, SEQ ID NO: 226, SEQ ID NO: 227, SEQ ID NO: 228, SEQ ID NO: 229, SEQ ID NO: 230, SEQ ID NO:231, SEQ ID NO: 232, SEQ ID NO: 233, SEQ ID NO: 234 SEQ ID NO: 235, SEQ ID NO: 236, SEQ ID NO: 237, SEQ ID NO: 238, SEQ ID NO: 239, SEQ ID NO: 240, SEQ ID NO: 241, SEQ ID NO: 242, SEQ ID NO: 243, SEQ ID NO: 244, SEQ ID NO: 245, SEQ ID NO:246, SEQ ID NO: 247, SEQ ID NO: 248, SEQ ID NO: 249, SEQ ID NO: 250, SEQ ID NO: 251, SEQ ID NO: 252, SEQ ID NO: 253, SEQ ID NO: 254, SEQ ID NO:255, SEQ ID NO: 256, SEQ ID NO: 257, SEQ ID NO: 258, SEQ ID NO: 259, SEQ ID NO: 260, SEQ ID NO: 261, SEQ ID NO: 262, SEQ ID NO: 263, SEQ ID NO:264, SEQ ID NO: 265, SEQ ID NO: 266, SEQ ID NO: 267, SEQ ID NO: 268, SEQ ID NO: 269, SEQ ID NO: 270, SEQ ID NO: 271, SEQ ID NO: 272, SEQ ID NO: 273, SEQ ID NO: 274 SEQ ID NO: 275, SEQ ID NO: 276, SEQ ID NO: 277, SEQ ID NO: 278, SEQ ID NO: 279, SEQ ID NO: 280, SEQ ID NO: 281, SEQ ID NO: 282, SEQ ID NO: 283, SEQ ID NO: 284, SEQ ID NO: 285, SEQ ID NO: 286, SEQ ID NO: 287, SEQ ID NO: 288, SEQ ID NO: 289, SEQ ID NO: 290, SEQ ID NO: 291, SEQ ID NO: 292, SEQ ID NO: 293, SEQ ID NO: 294, SEQ ID NO:295, SEQ ID NO: 296, SEQ ID NO: 297, SEQ ID NO: 298, SEQ ID NO 299, SEQ ID NO: 300, SEQ ID NO: 301, SEQ ID NO: 302, SEQ ID NO: 303, SEQ ID NO:304, SEQ ID NO: 305, SEQ ID NO: 306, SEQ ID NO: 307, SEQ ID NO: 308, SEQ ID NO: 309, SEQ ID NO: 310, SEQ ID NO: 311, SEQ ID NO: 312, SEQ ID NO: 313, SEQ ID NO: 314 SEQ ID NO: 315, SEQ ID NO: 316, SEQ ID NO: 317, SEQ ID NO: 318, SEQ ID NO: 319, SEQ ID NO: 320, SEQ ID NO: 321, SEQ ID NO: 322, SEQ ID NO: 323, SEQ ID NO: 324, SEQ ID NO: 325, SEQ ID NO: 326, SEQ ID NO: 327, SEQ ID NO: 328, SEQ ID NO: 329, SEQ ID NO: 330, SEQ ID NO: 331, SEQ ID NO: 332, SEQ ID NO: 333, SEQ ID NO: 334, SEQ ID NO:335, SEQ ID NO: 336, SEQ ID NO: 337, SEQ ID NO: 338, SEQ ID NO: 339, SEQ ID NO: 340, SEQ ID NO: 341, SEQ ID NO: 342, SEQ ID NO: 343, SEQ ID NO:344, SEQ ID NO: 345, SEQ ID NO: 346, SEQ ID NO: 347, SEQ ID NO: 348, SEQ ID NO: 349, SEQ ID NO: 350, SEQ ID NO: 351, SEQ ID NO: 352, SEQ ID NO: 353, SEQ ID NO: 354 SEQ ID NO: 355, SEQ ID NO: 356, SEQ ID NO: 357, SEQ ID NO: 358, SEQ ID NO: 359, SEQ ID NO: 360, SEQ ID NO: 361, SEQ ID NO: 362, SEQ ID NO: 363, SEQ ID NO: 364, SEQ ID NO: 365, SEQ ID NO: 366, SEQ ID NO: 367, SEQ ID NO: 368, SEQ ID NO: 369, SEQ ID NO: 370, SEQ ID NO: 371, SEQ ID NO: 372, SEQ ID NO: 373, SEQ ID NO: 374, SEQ ID NO:375, SEQ ID NO: 376, SEQ ID NO: 377, SEQ ID NO: 378, SEQ ID NO: 379, SEQ ID NO: 380, SEQ ID NO: 381, SEQ ID NO: 382, SEQ ID NO 383, SEQ ID NO:384, SEQ ID NO: 385, SEQ ID NO: 386, SEQ ID NO: 387, SEQ ID NO: 388, SEQ ID NO: 389, SEQ ID NO: 390, SEQ ID NO: 391, SEQ ID NO: 392, SEQ ID NO: 393, SEQ ID NO: 394 SEQ ID NO: 395, SEQ ID NO: 396, SEQ ID NO: 397, SEQ ID NO: 398, SEQ ID NO: 399, SEQ ID NO: 400, SEQ ID NO: 401, SEQ ID NO: 402, SEQ ID NO: 403, SEQ ID NO: 404, SEQ ID NO: 405, SEQ ID NO: 406, SEQ ID NO: 407, SEQ ID NO: 408, SEQ ID NO: 409, SEQ ID NO: 410, SEQ ID NO: 411, SEQ ID NO: 412, SEQ ID NO: 413, SEQ ID NO: 414, SEQ ID NO:415, SEQ ID NO: 416, SEQ ID NO: 417, 418, SEQ ID NO: 419, SEQ ID NO: 420, SEQ ID NO: 421, SEQ ID NO: 422, SEQ ID NO: 423, SEQ ID NO: 424, SEQ ID NO:425, SEQ ID NO: 426, SEQ ID NO: 427, SEQ ID NO: 428 or a homolog thereof.

31-46. (canceled)

47. The method of claim 29, further comprising infecting the cell with the virus.

48. The method of claim 47, further comprising determining if the virus can grow in the cell after administering the compound to the cell.

49. The method of claim 47, further comprising determining viral infection or replication after administering the compound to the cell.
